United States Patent Application Publication US 2026/0191916 A1 - sequence listing, part 112

SEQ ID NO: 714 - DNA, 307959 bp, Veillonella atypica
  source 1..307959: mol_type = genomic DNA
atttgatgactgtattataaataaaggctttaattaatgggagagaataaaaaatataacatttaaacagtatagaaaaagtgtattgtacttaaaagagttttcaccaatttgtactcaacatagtgtcaaggggagtgaatatgacaatgtacttcttgtattagagtctaattggaataaatacgatttttatacattatttgggaaaggatctttaaatcataatgttcggatgagaacaaaaaaactattctatgtatgtataacaagagcaaaaaagaatttagtaatatatttgcctactcaagattctgaaatattagataaagccaaagaattttttggtgaagaaaatgttttacctgtttcttcaattgattaaatttataaagaacggtttcattatacaattgaatatagtattttagtttttaggggatggattataagaattagggggaaatgctaaaatggataaaaaatatatagattttatggatgaaatatctgatgatgcattgtatgaaggtcttcttgcatatggcttttttgcagaaaagctacctcctgtattcactgctattccattttttgagtattgtaaaggtttagaaacctcattttcccaaggatggaatgagtatataagctttcgagtaatgcgaaatataggtacaccacgtattatgggaatccctaacccattcaaatatcaattgttatgcttagagctaaagtcaaactgggctaagataaaaaaacactttcaaactcaaactgctaatcagaatcatcgtattagtcgtattcatattcgaaaagaatctggaaagcgtcgaatctttgaaatgaattataaagactggcgtactgatggtaatccagagttggacttactatttcatgaagatggtgctagtaggtatttagttaaagcagatatatctacatgctttccaagtatttatagtcactcaataccttgggcattagtgggaaaagaaacagctaaaaaaaatcataaggatagcagtgcctggtataacaaaattgacagtgcatgttccgatatgcatcatggtgaaacacatggaattcttatcgggcctcattcttccaatctactttcagaaattattttaacggttgttgataggaagttatatgagaaaggttaccgttatgttagggctatagatgattatgattgttatgttaaaagttacaaggaagcacaatgttttattgttgagcttgaggaagcattatatgaatttgacttacacctcaatcataagaaaacaaaagtagttgagctaccaattggtgtagataagacttggaagcatactcttaaagggctaatcggagatagtgattcagggtcattaaattatactcaggttaatacatttatagatacagctttaaaacttgcggtagaatctggtgattatgcgattgtaaattatgccattaaaacattaaaaggcttaaacaaatcagaaaatggaaagttattaatcacaaaaagagttatgcatttagcaatcctttatccatatttacttcctctaatggaagaatttgtatttgaaccatataaggtagataaagaagaaattaaaaaattttcagatatgatatatcaggatgcagtgaaaataaatgattatgagagcttatgttatgcgatttatttttcgataaaatttgattttatcctcaatgaatttgaaaatgattatcaaaagtcacaagagtatgttattgatagtaaaaattgcttattgttgataatgacttggatttattttatgagacaaaatggttggaatcgaaaggccacgcaagtgaagccactaaataaagttgctatggagttaaagaatacagatatggatcgatattggcttttttgctatgaagctttaacttgggggagtttatctaatgaatggcgattaatgaaaaaggctggtgtaagctttattgatagttctataaaaacgaaatatgatattggttaataaattaagcttatattaattgacctttaacccttggtatttattagcttcataacaaggttctatgaaaacgacaatatctactggtgagtatcccaaatattctctccatgatgcaagggtacaaagaaaagaatatgcagatggtaatttaatttttacctttgattatattttttcttatgagaatagtggtgaacagactcataaggctaagattgtatttgagaaatgcgatattgatggtttagaaattctcgtttttaataatacaatattagatacttttacaggtaaaagtattgagtgacctcagtatcaacaggattatagtgaaagtgagtttgaggtcattacggagacctataattggggccgagctgtactccaaggatggttatggactgaagggaatccagttcactgtataatggacatatacttcacaggcgatatgttatatataattgatgagagcttgtaaaataaatctttcaacataaataaatgggagaaaataatcatgggctataaaaatgtatgtactaactgtcgaatcgccttatcggagggcacgaattatgagttatttaatacaaataaaacctgtcctatatgtaaaggtaaaatgtactttgtaaatgagaaatttaaagctcctaaaaaatctaatgataaagaatggaagattatcgagtatttgttattgagtggctatgattttaggaatcccatttatggtactgagagatatatgtatttcgagtttcctaagaacttacaggaggcggagtcattcgttcgtgagatgagaaagttatagtaaactatatgagcaaagcgctttaatgatatgtaaatgagcattatcatattacatagtatataaattgagaacagaatatgcatagtgaaggctacacaagagactatgtattagtgtagcctttagtggttaaacagtatatacttagagtaatagcaacataaattttacagagaggaggaaaactatgtgtgaagtaacaataacacaagctacagcagaattgcctatgcttgtaaaaaaactacagacaggagaagagtctgttgtgtatatcaagcaagatggacggactgtagcgcagcttacactatctgaagacactcgacaagcagaatctaaagttgatgtgtcgaaacgtataggcattgcaaaaggtaaatttaaaatgccaaaagattttgataaatgggataaagatatagaagaaatgtttggagatacaatatgaatatattattggacacacattatttactatggtctattttaggtgatgattcattatctaaagaagcaagtgatatgataatgaatccaaataataatatttattacagtattctttccctatgggaaattgaaattaagcatcttaaacgtccaatgtgtatgcctattgatgcagcaatggtagaagatagctgcactggtgcgggttttacattattacctatattggtgccacatgtgttagcattatctacattacatcgtgatgagaatgctaaagctcataaagatccatttgaccgtttgttaattgctcaggctaaaacatctgacatgatatttttaacacatgatgagcttttaccagattataatgaaccatgtatttgttttatgtaatgtgaaagattaaatgatatgctcatacgaaaagcaacaactgaagatttagatttagttacacttatagaatccacctgttttccaccagccgaagcagcccctcgtgaagcgtttaaagggcgccttgctcattatgcagaccatttccttattatttttgacggtgatacacctatcggttttatcgatggttttataacggatgatgaaatcctaaccgatgagatgtttgctgatgcatctatgcacaatcctgatggggcctggcagatgatatttggcctaaatacaatgccagcgtatcgcaatcgcggtgtaggggggcagttgattgaggctttcataaaattggccaaagaagaaaatcgaaaaggtgttattttaacatgtaaggaagaaaagattcactattatgccaagtttggctttgtaaatgaaggcgagtctgtatctgatcacggcggtgctaagtggtatcagatgcgtgttgtgttctagccatataattaaatataaaagaagaagctgaaatctttgcagtgcagcattgatttcagcttcttttttgttgggaaacatattaagtttctaccattaatgtaattagactatacggatttgcctattattgtgtataccaaaatccatatggttatttaaataatttctttaacttgcgccacgcctttatcggtcagcatatagtatccatttgttacatataacaagccttgtttcttaaggtgtgatgcggcttggtgtgtatagtctggcttccagttcaagtgttcgtgaatggtgccgataccattttcaatggccgccacaggtgtattcatatgggtatagatgtggcagagcatcattgtttcacgatagtgacgacgcaagtggcgttggcgaagataggttgcaatatagcctgtctttggcgtgcaaataacggcaattaataatgcgagaccgatcgttgttgcgatagcgcctgcaatggatacgtctagggtgaaagcgacttccgtaccgataacggcacagataatgccgatgatgatactactagtgagcatggctttcacagagtccgtccataaataagcgataaccgcaggtccgatcatgaggccgataacaaggatggcgcctactgcttggaatgaagccaccacggtaagggataccatggtcatcagcacgtagtggatgagggcaggcatgaagccgaagagccctgctaatagtggatcgaaggtagatagctgcaattccttgtagaagagcataactaataggaggttgatgaccgctacccccagggaaatccatagtgatacaggacctaagtcggtggagtttacaatccatctatcgaatggagcgaacgcaatttcccctaaaagtgcggtatctacgtcaaggtgtgcgttaccgctgtagagactgacgaggatgatggcaatggagaatagaagggggaagatgataccaatggacgcatcttcgttgacgagccccgtgttatgaatcatctctgtaagccataccgttcctacgccgactagtgttgcccctactagaagtaagggagagtttaagtcttccgttacaaagaaagcgagcacgatgccgaggaatacggtgtgcgtaatggcgtcagccatcatggacatgcggcgcagcacgaggaatacaccaggaatagcgcacgcgatggatactgcgatggcgatgagtaaaatctctgtatgtactgtcatggggcacctcttttccggaattgccacaagatgcctctataaggtgcaaatatgagactcaatagtacgataaccgacagaatgacgatgattgcaggccctgtaggcagtttttgtactgttgtactccaaatggtaccgcctatagcagataccatgccaaatagaccggctagtatacacatggtacctagcttgttcgtccactgacgggcccctacggccggtgcaatgagtagggaactaatcaagatagcacctactgattgaatgccgatgatgatggtcatgatcaatagagaacgatataaaatgagtgtaaaggtgacgggaatttgcaatgttttggcgtattctacgtcaaaggaaatgagctttagctctttccaaaataaggctgttaaaacgataatgatgagcgctgccgccgatgtaatgtacacatcgcgggctaatatggtggcggcctgtccaaatataaattttgaaagccccgcctgacctgcattgttcagactttgaaggtaggtgagtagaaccataccaagaccaaagaaagcagatagtatagtagctagagcgccatcgaatttgattttactgttttctacggtgatggttatgagccacgccgcagtgatggaggacagggcagcacctataatgagtacctcaatgtctttgataccggtcagtaagaacgcgatgactacaccaggcagtgccgcatgggagagaccgtcaccgatgaggctttccttgcgtagtactgcgaaggttcctgcaataccactggcaaggcccaagagagccgtgccgagcaataccatctgtgtcgtataggattggagtatggtcatacaatcatccccttgccgtaggtacgctcgatggcctcatcggtaaaggtctctgctacgggaccataggcaacagtttgcttattgaccatcgttacccagtcgaaatattgaggtaccgtatttaaatcgtggtgtacgacgatcaccgttttgccgcgcgctttcatttcttgtaaaagagagataatggcgtgctccgtcgttttgtcgacacccttgaaaggctcgtccatgaggtaaatatctgcctcttgtacgagggctctcgcaaggaatacacgctgttgttgtcctcctgaaagttgacgaatttgcctgtttacatagtcgctcatgcccattttttcaatcatggagagggccagctccttatcctttttacttggtcgtttgaaccaaccaagatgaccatagcggcccataagtacaacgtctaatacggtagtaggaaagtcccagtctacgctaccgctttgagggacataggcgattttcttgtaatcctttttgtccatcgcaaggtggtggtcgatataaaacttaacactacctgagataactgttaataggcctaacatggcctttaataatgtagatttaccggccccattagggccgacgatagccgctaaggaaccgatgggtaccttcatatctacgtcccataacacgggttttgtcgtataggctacggtcatatcttcaacttcaacggcccattccatagagacctccttttatcattgtttatttaagtgctttaacgatggtatcgatattggcttttaccatgccgatatatgtgccaccttcagtgccttcagaaccgagggagtcggagtataattcgccaccgatggcaacgttccagcctttagccttagctgcttcttgaacggcttcaattgttttgtgtggtacagaagattctacgaagatcgctttaattttgtgatctacgatgaattgcacaagttcattcacatcttgtgtgcctgcttctgtagcggtactaacgccttgtaaaccttttacttcaaagccataagcgcgagcaaagtattggaaggcgtcgtgtgctgttacgaggacgcgagattctttaggaatagattctgcttgtgctttaatgtatgcatctgtgtcatctaatttagtgaggtatgcatcatatcgttttttgaaatcctctttgtgagttgggtctgcttttgaaagtccttcgtatacagccttagctgcaagtttccaatttgctacatcgaaccaaatatgaggatctttagttttcacgccattttcttcatcaaagtcgagtagagtggctggatcaatggcgtcggatacgcggatggtagctttattttgttttgttaaattgtcgaaaatggaacccattttaccttctaagtgaacaccgttgtacaccactacatctgctttagacatagcagttacatcgccggcgctcgcttgatagaggtgagggtctacgccaggacccataagaccttgcacagatacatggtcaccgccgatttcttttactaaatccgttaacattgtagtagtagctacaacatttaattttttctgactgtcttgcgctgcatcttttccacagcctgctaatgcgaacaacatcagtgctaatgatacgacgactaatacgattctattaaatttcataataaacctccttttgtaggtactaagtttaaaatttttagttatcttgttaactacccttatttaagcggaaaaatagccgctactaacgtagcggctagtggcagttatacggttttctgctaaggtcacgatcgtttagtggatgagagattgtagatggtttggcccaacgagggcaacgataccaagtaccatcatgaccttcatttgaatacgctttctacgtctcatgatgaacctcctttgtgtaatttttttgtcatatcaacttgatatgtaagtccgaacagttatcttgaaatcaatatatcataaatgagaaaaattatcaataaaaattattctatacatatattttttactaatagactacattttgcagttgggtatttttttcttcatctttatcgagtattatatatgtatatttattatattaatttcgagggggaacaaaccatgaatatattaactcgattcgcgtgtgctgctgttcttacatttgcggtaggtgctatgatgcctgctcatgctgatgcggctgcgggtagatttacagaagcacctcgcgaggtatctatcgttaaacctacgatgccagctattccaaatggaattactgtagcagatcatatgcgtgtacgattcctaattaacaaacaaggcaaggttgaaaatgtctttgtagaacaatcctctggttatggtcctgttgatgaggctgtgaaagctgctattagacaatgggagtttacgccggctattggcacagataaaaaagcccatgcatccatcataggcatgacaattacattgccaaagggtaatgctccagctaagtccggcaatggtaaattgacggtagacaaatcacagtctaacgataatcatgcgtctgatgtgaatgcgaaagcgaatggtcctaaggcaaaataaggagtgaaacagtttaggactcaataatgagagtagtcataagactaaatgaggagaaagatgatgagtaatgtattgcgttgtgttgccttaacggcattaattatgtccatgtctgccgctgtttctttggcggccacaccttatgaagcgccaaaagcagtatctacaccaggctttgattctggtgtactacatggttatgccggtgatgcaactgttgttaatgtaaattttactattaatacagatggatccgtttctcatgtagaattacaaggaaccactggtagtagtgatgcggatgcatccattgtgaacacaatttctacatggaaatttacaccggctacggatagtaatggcaatcctgtagaggcatctaaaactgaatatattaatttaaggaattaatagaaggcactcatacattgtatgggtgcctttttatgtgctggtgaaagtacttaaggatttaattatattgggtgaaagtattttgtggctcaattatcttgggaaatgtatctgcagcaactgaaaattactttcaaaatgaatataataaaaatatatttaatatagtaataatatattgtatatactaatagtctttgacccctggaggtataagcgtatgaatccattacagcaaaagctagacattaataacgaacggtacagaattattgtatctattaaagaagattatttagacggtaaattatccttggaagagggtaaccgtattttaaaagaaaagttaggtacttgtacacctgacgaatttgcttatgcagagcaaagtttgaaaggtgtctataaggatgaagaaatactagacaagatggatgatttgttgaatttatttgacggtgtattagtgcgtgccgaaaatgagtacccagagaatcatccgttgtgggcttatttagaagaaattaatgcggttgaaaaggtagctcttgaagcggatgaactgttaaaacaagataagtttattaaaaatccttggcttggtgtttttgattccttagcagaatggcgtatccatttatctcgtaagcaaaatcaattatatccaatgttagaaaatcatgggtttgatcgtccaacgcggattatgtggacctttgatgatggcgtgcgcgatgctatctctgcatcctatgcattgcttcgtgaagataaatacgaagaattcctagcatctgttccagaaacactggcaaagttacgtgatttgaactctaaggagttagaggttttattgccaacatcctttaaattattaagcgatgaagagtttgtgcgcatgagtaaaaatgaccatgaaatcggttatgctattattaacgcaccaggtttatatgttgtgccaggcatcaatgattccgcagcctcattaaatggaaatgctgctagtcaaaatagtgcagtatctaatgagtttctaaatgatttggcaggtctattatccaaatatgttggccctgtaggaggtgcagccgttagtaaggatgctgtcctagatgtggccactggcaaattgaccttagaacaaattaatttgttgttccgtcatctgcctgtggatttatcctatgtagatgaaaatgaactcgttaaattctacagtgatacaccacatcgcattttccctcgtagtgccaatgttattggccgagaggtgaagaattgccatcctgcgaagtctgttcatgtagtagaagaaatcgtagagaaattccgttcgggagaacaaagccaagcagaattttggatcaataaaccgggcttgtttatctatgttatctacacggcagtgcgcgatgaaaatggtaaattccgaggcgtactagaaatgatgcaagattgtacacatatccgtgaattagaaggctcccgtacattgttgacttgggataaaactgactttgtaggcgataatcaacgcatttattaataaaaataaaaagtaactttattattacaaaatgtgttgcactaatttaaaataaacatacaataatttacttttattcatctctttcgtgtatacaaatttattaaaaacaggtaaaatagagattattagaagtattttcaatacacgtaccgatagatttttataaggttatacgataaaggtgaggattagaatggcaacacgtcgcatttggaatcaaagtgaaatcaagacaaatccgttattttctaaattacgcagcaccattgaaactgcgttttatggtaataacgtaaaacctgttacatctgtagcagaagcgtatacattggcaacgcaagaaccaggtgtcattcttcttgatatgcctgtatttaaaccagaagaacaaggtttaccagctgatgctaaaattctcgtaactaatgatggtaaaacgactggccgctatgcgaaggctcgccgtattattggtgatgaaggtattgatgaagtcgaattagccggtatcgctcgtgatgctgtgtatgatagtcgcaataaagaatggatttctacacaagttgtggttggtcttgatcaaaaattcacggctcgtgctcatcttatgattccaaaggatcatgcatccatcatgtattcttggattatgaactttaaattctttgacgaagcgacaaaagatttctacaacaacagtaaagatattccagaaggggatatttacatctattctgaccctgactatgtagtaccaggtcatccaggtggtcttgctatttttgaccctgctcataactgcgctatgattcttggcatgcgttactttggggaacataaaaaaggcacattgacattggcttggtccttagcaaaccgttatggctacgtagcctgccacggcggtatgaaacgctataaccttaaaactggtaagtctttcacaatcggcgtatttggtctatccggttccggtaaatctacattgactcacgaaaaacacaatggtcgctatgatatttctatcttgcatgatgatgcatatatcatcaatacaaatgatttgtcctccgttgcgatggaaccaacatactttgataaaatgcaggactatcctgtggaacaccctgctaacaaatatttgttaacattacaaaacgtgggtgtaaccctcgatgaaaatggtaataaggtcgtattggctgaggacgtgcgcaacaataatggccgtgctattaaatcccaattctggacagacaatcgcgtaaaccacgtggacgaaccggttaatgccattgtgtggctaatgaaagataaaacattgccaccaatccttaaaatcgacgaccctgtattggcttccactatgggcgcaacccttgcaacacgccgctctactgcggaaaaactcgatgccaacgtcgatccaaatgcactcgttattgagccatatgcaaatccattccgtacctatccgttagttcgtgattatgaaagctacaaaaaactcttcaaagaatgtggcgtagattgttatatcatgaacaccggattcttccttgaaaagaaaatccctaaagaagtgacccttgatttattagaacgcctagtagaaggagacctacaattcgaaccattcggtgcctatgaaaacctatcctacgtagaagtgccaggattcgaaccaccatttgatgtacgtgaataccatcaccaactacaccaagcctttgaattccgctctgaatacgtggaaaaactcaaagacggtaaaaatgaattaccacacgaagtacttgatgtactaaaaactttaatgtaatactatagttaaatacaaaacagcccgtcacaaatgacacgctactgcgctaaagcggagcccgaagtcatttgtgacgggctgtttttactttgtcctttatgcttatacattaaagtttttagtgcatttgcgttagagaagctactgcgctgaagcggagcccgaagttttttccagaggggctatttcttttctgtattttttacattaaagtttttattacaccggcgttaatacagacacgctactgtgctacgcggagcccgaagtcgtttgaggaggattttttcatccttacttattcagtaagtacattaaagtttttatcatatctgcgttaagagacacgctactgggctaaagcggagctaatgtttaaaatattttagatggagcagtaaaattttgtgaaaatgatgcaggagaattattgatgtatatcgaagtagtattatgaggcatttatttctcgtgagtgcttttaattcctataataaacaggaattaaaaatcagtttgttttatgaagttattatgagttttgtaattgaaaaacattgttataatggggataggatcggatatttttttataatatgtataaaatttaattgacaattgtcctctcaacaaatatacttatgatagtttaaaacatatttatgagataggatttaaaacccacaattaaggtggatttaagttagatagaagaagaatatgttttcttgttattagcggttggcctacgtaggcccctaggaggtttaaaatgagtaaagacgtggaaaataaaaatacccatgaccatagctatggtgaacatcatcattgccattgcggcggtcatcatcaccatcatgaccatgaccacaatcatgatcacgaccatgaccatgaacatcatcacgaccacgaccatggtcacgatcatagccatgaaaaggctttgcctacagataaatgggtgccacacactcatgaaccaggcgttcctcatgaacatggcgtaaatgattatcttaaggctgttgctgagtatcgtaaaacatggcctactaagcaagatgttatcgagcaaactcctgaccctgccgtgcgtgagatgattcttcgtatggaacaaatcggttgcgacactgtattcgaccgtttcgataaacaacaacctcaatgtgcgttcggtattgctggcgtatgttgtcgtatttgtttcatgggtccatgtaaaattacgcctaagagccctcgtggcgtctgcggtgccgatgctgatcttatcgtagctcgtaacatgacacgtgctgctgctggtggtttgactcaacatggtgcgcatgctcgtgaaattttgatttctttgaaagctgccgctaatgatcaattggatattccaattttgggcgaagaaaaaatccgtactgtatgtaaggctttcaacatccctgaagaaggtcgttctttgaaagaagtagctaatgatttagcagacgttctattagaagatttaagtcgtgcattgcctggcgaatataaaacaattacagcaatggctcctgctgaacgtcgcgaagtttggaaaaacttggatattttgcctatttccgcgtacaatgaagcatttgatgcataccatcgtacatgcgtaggtacagatggcgattgggaaagcaatatgaaacaattcttgcgttgtggtcttgctttcacattcactggcgtagtagcggcagatattgctacagatgccttgttcggacaaggcggtcgtcgtacatctaaagttaacattggtgccttgaaaaaaggttatgtaaatatcgctgttcatggtcacttgccaacattagtatctcaaatttgtacaattggtgcctctgaagagtatttagaaaaagcgaaagctatcggtgccaaaggcatccaattctacggtatctgctgctctggtttgtccagcatgtaccgttatgaaaatgttattccattgtgtaatgctatcggtgcggaacttgtacttggtacaggcgcactcgattgctgggtagctgacgttcaagacgtttaccctgctatcatggacgtagcacgttgcttcaacacaaaagttatcactacatctgatgcagcgcgtttaccaggtgcagaacatattggttacgatcaccatcatactaacttgtctgaaacaaaagcattggctcgcaaaatcttggatcgcgctcttgaagctcatgaattgcgtaaaggcatgcctgtattcattccgccatacgaaatcactgcagaggttggtttctctccagaatccactgttaaacattatggttccttcaaaccattggcagaggctttaaaatctggtaaagttcgtggtatcgttaacgtagtaggttgttccaaccctcgcgttatttacgaaaaagcaactgtagatatcgttgatacacttatcaaaaatggctgtatcatcttaacaaatggttgtgcgtccttcccattgatgaaacttggttactgtaatacagatgctattaagaaatgtagccctgcattacaagagttcttgggcgatgatcaaccaccagtatggcatgttggcgaatgtgtagataatgctcgttcttccggtatctttgctggtattgcaggtgaattaggtcttaacttaccacaaatgccatttgctatgtctagccctgaatggtctaacgaaaaaggtatcgatgcatcccttggcttccgcttaatgggcatcaactcctaccactgcgttgagccacctacacaaggctctgatgctgttacaaaatggttgaaagaagacactaaagacatcctaggctctgttatgtatgtaaatacagatccagctaaagttgctgaaaaaatcttggcagatatcgatgaaaaacgtgctgctttaggttgggcagaagtaaaataatataatataaacaaaagaccctctccataatcctccaccgcccagatctgttccttcggaacaggggcaaagtcggattctgaagagggtcttttttgtatagggagaaaagacagagcaaagtcggacgtattgagagggttatttcattagaggtaaactctaaattagtaaatctaaatgatgagttttattttctacgttttagcctaattaataaatatgtgtgaaagtagaaaaaagagatagcagacaatttgtccgctatctcttttaatcaaaagttcatcaacttaatctattacgtcatttataactctgttatactaataacaggagtcattgacgtgagttaggttcatcaccgaaaggtggtgatactatgagtaaattcgagaaggtttatttaactctttttgtaatttccgtagttgtatctatcttaagtttattcaaataaacttaagaaacgcctaacgtaataagtactggtaatacttacacgttaggcgcatctcgttttactaatttttagatgagcctaacgcttgcacacgtcaatgaccctctttatgtttatagtatacctcaataacaacataaaaacaacataggtatatagtaacttatagtataatagtttctccatcctcagggactgctacatggctttcgatattggtgcctttgataaatttgtgcacatccttacggcttgttgctgtatgattaactgtatccatatgaacagcgatgattttagcttctggtttgcgtactaccatgcggccaatatcttttgtccccataataatactatcttcaaagcccaaaacttgagcatatcctgtattcataataataacattagggtcgaagcgaagaagggccttctctacatcgcttgtccatactgtatcgcctacaaggtacacagttggttcgccttctgcttcaaaaataacgcccattgcatcgcctgctaatggtgcgagaactggatttgcatacatttctacagtgccgtgtgagccacctgtttttctcaatgtgataccattaaactcaagactttcaaaaatgatgcgtacatcattaaagccttgggagataataagttctttgtccgctgtattttgcacaaaaataggaagtgactttggaatagatttaattgccgtgtcatcccaatgatcgagatgtgtgtgtgtaactactaccgcagttacattgcttaatagattgtccattgatacaggtaaatcaaccataggcattctttgttgatagttaaatgttccttcaaagccaggataagtatctttgggtgctaagaatggatcaataagaaatgttgtgttttttattgttaattttcctgtagcatttctaatgtgagtatattttgtcataggtatctccttaattgtattttgaaaatctaatcaaatagattactgtttgtaatccctagaattagtgtaccttgttttgttatactagtctcaacaataattgacactatgtttgttaatagacacattgtataaatgtgtctatgtaggaggttatatgataactcgaaaagaaatgacacgaatgttgttaaaagaagggttgcttagctgtttagaaaaccattcttttgagtctttaaccgtaacattgttgtgtaaagcatcaggtataactcgttctacattttatttacactatagcaatataatggaaattgttgatgatttagtagatgatgcaatcgcttattcgcgaccaggaatggtagataataataatttacaaactatagctcaaaccttatcagctgcttctaattctgtttcgctgagagaagcatacgattctatttttgatagattgcccttatgtcagcgtattatacgacataaaaagtatttacctttatttttagatgaacaaatttcagaatatgtattacaacgaattatacggagtgaaaaagatcggcaagggcttgttatggcagaagcacttgggacttcatttgacgtgggtgtatccgtttttgtgtttttagtgcacggactatatgctgttaataaacaatataagtggtcccaaagcgatgaatggttagaagcacagaaagttatctttgaactcgtttgccgtgggttacaaagaaaataagcatataaggctcacatacttccttggtgcatcaatacatgctcgcctagaaattagtacaggcctgtactaatttctagaagaggtatatggatgaggtcaaggccctaggccgcagaccgttctgtctatttagaacgaataaattcatgggcgaccgtaattgctgtggcagaaaatataatttactatgtgatgctctaatacagatctaaatttcaataaaagaacacccacaattatccgactttactaggtcaaggccctaggccgcagaccgttctgtctatttagaacgaataaattcatgggcaaccgtaattgctgtggcagaaaatataatttactatatgatgctctaatacagatctaaattccaataaaagaacacccacaattatccgactttgctaggtcaaggccctaggccgcagaccgttctgtctatttagaacgcataaattcatgggcgaccgtaattgctgtaatagaaaatataattcaccatgtgatgctctaatacagatctaaatttcaataaaagaacacccacaattatccgactttactaggtcaaggccctaggccgcagaccgttaaagtagctggaggataattgtgggtgtcttttattaccaagtttagatagtaaattatattttctattccgcagttataaggtagaacatgaatttatacgttcatgtttgccccttttctcacatagaaccagaagcaaaccgcaactgttacgatattgaatgctagtagtactgcgaatgcaggatgaatattgccgaatgtggagtatacgaaaccgaagattttaggtgtaatgaatgcaccgtatgcagctacagcagctacgaaacctgtgattagagaggataacaacggattgccaaatacgtgaggaatcatacggaatgtagcaccagttgcgaagccacagcatacgaatgtcaacacggacatagcaaagaagaatgggaagttgtgcatatctacgccaaccgcaattagcgctgttgttgcacatagaccgagaaggcttacaaaggtaacttttgtaccgctgttaattttgtctgctaaccaaccacctacagggcgaagtgcacctgctacaagtggacctacgaatgcgatagaagcaaatggtacttctgggaattctttacctactaatagaccaagtgctgctgcataaccagagaaagcaccgaaggaacatgtataaagtaatgtaagagcccaagtgtgtttgttcccaaagatttgtacaagatttttaggatttggtttttctagtggtaagttatccatgaaacgtgtcataagtgcaaggataacaacgagtggtacgatccacatgaaagctgcattggcaaggtatactgcgttacctttgatgatagctggtgttacaccaaatacactacctagtgcagcggaacccatagcaaatggagccaagaagtagattacagaaacaccaaggttaccaacgccgccgttgataccaagagcagtacctttttcggatttagggaagaagttgccaatgtacgccatggaggacgagaagttgccgcccgctaaaccgatgagggctgttaaaatcataaatgtcgtataagaagttgttgtatcttgtactgcaaagccgagccacacaacaggaactaataaaatgagtgtggatataaaggtccagttcttaccgcccataagtgcaggcatatatgtgtagacgaaacgcaatgtagcacctacaaggcctggtaaggctgcgagtgtaaataattgttcagttgtaaagtggaaacctgcgccatttaattgtgctgcgatggtagcccatagataccatacgcaaaaggctaaggttaaggcaatagtggatattaccaagttttgtttggcgatttttttaccaaacttttcccaaaattcgggattttctggttgccagttcgcaacaatctctttgcgacttgcacctacttgaggcattttcagttctgacatgagagctctcctttaactaaaacacatgtgataaagggtagatcttttcacacgaatatgtggcacatctcgtttaaaagccttgtaaaatgtggtactataataatagagagtgtgcctaaaatcacaccattattatataggacagaatataatgtgaatgtgacgaaaaacacacttatatgagaattaatcggttataatagggataatatacgtaaagtatatagtatatgtgccttttgtgcatggctgattgtgaaagctactttcacaatcaatatggacaaatgacactgaaagatgcacggtgatagtatggaacaggagttaattaaccagttacttgcattgccaggagaaacaattcaccttgaaaaaggcgagtttttgtttcacgaaggtgatatagcagatcatttttttattgtccgtgaagggcgacttagtattaagaaatttgaggcaagtggtcatatttttgctcatcggttggtggggccaaataatgtgcttggtgaaattcctttgtacgagacgaacacccggacttacgtgttcaatgcgattgcacgtgaaaaatgctcggtatattccatccgttatgatgttttagaaccagccattgcaaaggaccattcactggccattgcaatgatgaaaatctatacacttcatatgcggcgacaacaagccaaatacagagatttgttgttgtatggcaaaaaaggtgcattctattcgacactattgcgtttagctaatagctatggtattcaacgtgatgacggtatctatatagacatcgcgttaacaaatcaagagttagctgaatttgctgccacatctcgggaaagtttaaaccgcatgctcagtgagttacgaaaattaggctatgtagcctatgataaacaccatctggtaatctgtgacttagatgcattaatcggattactcgatttagatagcgacacgatcgaccctaatatcagtaatatcgaataattgtggatattcgcccttgttgttggcattgctaacgcaagggcttttttgtagttttaaggaggacacgagatgagtttattgtctcagaaattcaagtttcttcgcaagaaggacgtatctccaagcggtcaccaaatcacagaagaaggcggtcgcgaatgggaaaatttttatcgtgaccgttggtcctacgataaagtagtccgcacaacacatggcgtaaactgtactggttcttgtagctggaacatttacgttaaaaatggcgtcgtagcatgggaaaaccaagctacagattatccggaaacaccggatgatatgccggactatgaaccacgtgggtgccctcgtggtgcgacattctcttggtatttatacagcccattgcgcgtaaaatatccatatgtacgcggcgaattggctgagctttggagagaagctaagaaaacagctaaaaatcctatcgaagcatggaaatctatcgtagaagaccctgaaaaggcgaaaaaatataaatctgcccgtggtatgggtggctttgtgcgctccacttgggacgaagcgacagaaatcactgcagcatctttactatatacagcaaaaacatacggccctgaccgcaacgcaggcttctctgtaattccagcgatgtccatgttgtcctatgcagcaggtgctcgtttccttaacttaatgggcggttcaccattgtccttctatgactggtatgccgatttaccaccttctagccctcaagtttggggtgaacaaacggatacacctgaatctggtgactggtacaatgctggttacatcatgacttggggttccaacgtaccgttgactcgtacgcctgatgctcacttcttgacagaggtccgttacaaaggtactaaggttgtatccgtatcccctgactatgcggaatctacaacttcttctgatgcttggcttaatgtgaaagccggcactgatgcggctcttgctatggcaatgggtcatgttatcttaaaagaatattacatcgataaggaaactccatacttcaaagagtatgctaaagagtttaccgatatgccattccttgtacgcgttgaagacatcaacggtgcagtacaaccaggtcgtttcttaaacgctaaggatttaggtagcaaagaagacggtgctgatttccaaactgtattaattgatgaaacaacaaatgaaatcgttgttccaaatggtacaatgggcgaccgtcatacacatcctgaaaagtggaacttacgccttgaaaaccgcaatacaggggctaaaattgaccctcgcttatccgtatttgaccaacgtcaagatgtgactgttgttaagttgccatactttggtgatgaagagcacgaaggcgttattgaacgtgctattccaactattacagtacaaactgtagacggtcctgtaaaagtaactaccgtatatgaccttattcttgctaactatggtatcgaccgtggtatcggtggtgaagtagcgaaagcttacactgatgacactccatatacacctacatggcaagaaaaaattactggcgtaaaagcagatatcgctattgctacagctcgtgaatttgcagataatgcagaaaaaactaaaggtcgttccatgattatcatgggcggtggtatcaaccactggtaccatgcggatatcatttaccgtacaatcttgaacctcatcatgttctgtggtacagaaggtgttaacggtggtggctgggctcactacgtaggtcaagaaaaacttcgtcctgttgaaggttggggcggtatcatgacagctaacgactggagtaaagctcctcgtttgcaaaatggtacatcttggttctactttgctacagaacaatatcgttctgattgcatcgatttggcagaccgcgtatctaaattagctaagcctcgctaccgtcatcctggtgactacaatgtattggcagctcgtttaggttggttgccatcgtaccctactttcaataaaggcagtcaagaattgattaacgacgctcgtgcagcgggtgctggtacagaagcagaaatcaaccaatatgtggcgcaagcattgaaaaataaagaattacaattctgcgtagaagatcctgcggctaaagaaaaccacccacgcaacttgtttgtatggcgtgcaaaccttatcggttcttcctctaaaggccatgaatacttcttgaaacatttacttggtacaaaacatggtgttctcgaagatgatgacgcaccagtaaaaccagaagaaatcaaatggcgcgaagcagatgaagctggtaagcttgacctcttaatcgacatcgacttccgtatggcttctacaggcttgtattctgatatcgtattccctgcagctacatggtatgaaaaagaagacttgtcttctacagatatgcatccatatgtacacgtattccaagctgctgttgattgcgcatgggaaactaaatctgactgggatacattccgtacccttgcagaaacagtatctcgcgtagcaaaagagtctggcttcacagaatacgaagatatcgtagcattacctcttggtcatgatagcccaggtgaagtggctcaaccagaaggtaaggttctcgactggagcaaaggcgaatgtgaaccaattcctggtaaaacaatgccgaacctcgttcatgtaaaacgcgattatagtaaaatctttgaaaaatacattgcattgggacctaatattgaaaataaaatgggtgctcatggtatggcttgggatgtatctgatgaatataagacattatatgatcaaaatggtacaatcgataatccagaattcatttctcatggtcgccctagcatttacgaatgtaaggaagcttgtaatgttgtattgacattgtcctcttgtacaaacggtaaattggctgttcgctcttggaaagcaatggaagaaaaaacaggtctttctggtcttgaaaagaatgcaaaaggccgtgaacaagaaaaaattactttcgatgacatggttcgccaaccacgcttcattattagctctgtaacaagtactggtaagaacgataaaaaccgtcgttactctccatttacaacatctacagaagataaggtaccattccgtaccgtaacaggtcgtcaatccttctattgcgaccatgaaatgatgcgtgattacggtgaagctatggcgttgtacaaacctgtattgtcctataaaccagtacaaggtgactacaaacaagaaggtatccctgaaatcacattgaaatacttaacaccacatcataagtggtctacacatagtatgtatttcgatagccaacaaatgttgacattgttccgtggtggtcaaacaatttggctcaacgaagacgatgcagcagaaattgacgttaaagataatgattgggtagaagctttcaataaaaacggtatcgttgcagctcgtgctgtagtttccccacgtattcctcgcggtatttcctatatgcaccattcccaagaccgtcacattaacgttcccggtgcgaaggttaagaaacaacgtggtggtacgcataatgcaccaactcatattcacatgaaaccgacacacatgatcggcggttatggccaattgagctatggctttaactactatggcccaactggtaaccaacgtgatatgacaattgtggctcgtaaaatgaaggaggtagattggcttgaagattaaggctcaagtatctatggtcctaaatttggataagtgtttgggttgtcatacatgctctatcacttgtaaaaatacatggacgaaccgcgaaggcgcggaatatatgtacttcaataacgtggaaactcgcccaggcgtaggttatccacgtcattgggaagaccaagaaaaatggaaaggcggctggacattagataactctggcaaattagctctttctacaggttctaaaacaaaccgtttgatgaaattattcttccatcctgaacaaccagaattgaaagattattttgaaccttggacatatgactatgaaacattgattcatggtggtcgtaaaaacaaccaaccagttgctcgtcctcgttcccttgtgactaaacaaaaaatggaagttacttggggccctaactgggatgacgatttggctggtggtcaacatgctcgctctgatgtgaacttaactaagatgggccaagatatcgtatttgactacgaagaagtgttcatgcgctacttgcctcgtctttgtaaccactgcttgaaccctgcatgtgtagctgcatgtccatccggcgcgatttataaacgcgacgaagatggtgtggttctcgtatctcaagatgtatgccgcggttggagacattgtgttccatcttgtccatacaaaaaaatcttctataactgggaaactaataaagctgaaaaatgcgtattctgttacccacgcttggaaaatggcttgcctcaaatctgtgctgaaacttgtgtaggtcgtatgcgctatgttggcgttgtattctacgatatggacaaagtagaagctatggcagctacaaaaaatgaacaagatatttacgaaaatacattagatttgattttggatcctcatgatccagaggttatcaaagcggctcgtgcagaaggcatctctgaagcatggattaaagcagctcaaaaatctcctgtatacaaacttgttaaagaatggggcgtggcattgccattgcatcctgagtatcgcacattgccaatggtttggtatgtaccaccactcagcccaatcttgcaacgcgtaacatctgatgtatacttgccagatgcacatgaaatgcgcgtacctgtacaataccttgctaacttgtttacagcaggtaatacagaaattttagctcgtacattgcaacgtgttctcgacatgcgtgaatacatgcgtcgtcgtgaaacaggtgacggtcctatcgatcacaatgtggagttaacagaggatcaaatgtacggtatgtacaaattgttggcattgtccaaatacaatgatcgctttgttattccatctgatgtaaaagtatctcgcgaaggtcgcctagaaatgcaacaaaatcgcggttttgcttgccctacagggggatgtcaataatgaaggatgctcagaaaatcgctcttattgcgtcatttcttctacgctatcctgatgaacaatggtataacgaattacctgaatggagagaggacgcccaatccgttgggcatcctcaacttcgccaaggtttattagaattcttcgactatgtagaggaatccgataaaaaagaatttgaagaccaatatgttcgtacctttgattttagtcaaaatacaactatgtatttatcgacttatgaattgcaaggtactggggaacaagcagaagaactcgttaaatttaaagcgttcttcctagaaaacgactatgatttgccaaaagaaatgccagactatattccagcacttcttgaattatgtgccgttatcgatgatgaaaaagcaaaagaaatttacgactattgtaagccaaaattggaatacattagagaacgcttcattgaggctaaattgccttatgcattcttgtttgatattatcttgtctgttgcaaatggattggaggacggtgcacgatgaatctattcctttggggcgctttgccttacatcgctttcaccttcttaatcgtaggtactttggttcgtttcttttactttgaaagaaattggactacaaaatcgagtgaatttttagagaaaaaacaattgcgcattgctaatccactattccactttggcttgctatgcgttatcggtggtcacgtagtaggtgtgttaatccctaaaacttggaccgctgcaatcggtattaatgaccatatgtaccatcaaggtgcgttatacatgggtgctgtagcgggtattatcttcatcgtaggcttcttgcttttgatgaaacgtcgctttactgtgcctgctatgaaagttaacacatctggtcttgataaatggttatacttgttcttaacattagctatttttagcggtatggctggtacattgcttaatgcatctggtttctttgattaccgcgtatccatcggcccttggttccgtagcctaatctcctttatgccggatccatccttgatggaaggcgtaccattcatgtttaaattccacatgttagcgtggatggtggtagctattatcttcccattcagccgtttggtacactgcttgagtgttccactcaactacttagcacgtccgttcatcgtatatcgcaaacgtgatcgtgtataattgaatacttgatagttcgtatcggttatgtccgatatactattacttagaatggccctcatggttgtgaaagtttgcgcttttatgactatgagggcctttattattgctgtgattttatctgttattttagatttttttatataagattctagtattctgactatatgagtaatattcatgtttttatgtgagattggtatacattttcactttactatgagaatgaaaattggtattatcttatgtggaattatttaacatcatatatatttaactgtgaggagtctcgataatggcagaagtagtgaagaaacaatttaagagtaagtaccatattcttatttggattgctgtgttagcactcatcttaatgggaatggtagaatatgggtatgtgactggcggcagaccatttggtaactggaaggttcatttaggtttaattccctatgctgcatggctcgtattaacctacattgcaacgaagccaaaatggtttatcaaacgatataatcctaaagaaatgtttgaagtgcatcgtatagtaggtattgtcagcgttgtcttagtctgtgctcactggtatgtatacttcttaaaggccctaaaatctttcttaggtttttggggcggttatatctcccttggagccatgtttattgctcttatttttggtgtactatacttaacaccttggattggaaatatggcaaaatccgtatctcgtaagaaagcgatttggattcatcgtttaaatcttattgccatcattgcagcaaacattcatgttcatggttttggtcgtttgtccaaaatggtaccattcttacctgtatttgatgtattaacatatgcattggttatttattacatctattggatgatcaaacaaaagcaatactaagaatgtagtatatattttttataaatagaagctctcgtctattactaagagatgagagcttttttcgtacctatctttacttattagtgcataagagatggtctttttttcttgtttacgatacaatatataggtaagttatcttaatatatttaggtaaatatattctaaatgatgtatattatttaattgcttgaaggttgtatggatatttcatggaagcgcatcatctatttgatttgcgctatacaagtcggtgcgggtattactattatcggcgtattatcatttatacctttatatttggtagatctagggctcaccaatcaaggtgaggctgctatgtgggccggtcttgtatctggtgtaacaccttgtatggtagccttgagtgctcccttttggtccaggaaagccaatgaactaggtcctcggcgggtgatgatgttcatccttgccactctgatgctagctgtaggggctgccgggtttgcacaaacgccgagtcagctattagtgttgcgtaccttacaaggcttagtgggtggttttgtacccattggacttggtatcattgtattaatcacaccagaggaacgcgtaccatgggcgatgggattgtaccaagcatcgatggtgatggggcttgtttttggccctcttatgggtggccttgctgccgatttattaggctatcgggctccgttctttatgttttctatcttatcaggcttgtgcttgttaggtgtgtacctactcatgcctaatctacagcatacgcataaggtagatagtaatgagtcccaatggtcattaattaaatcatttcttgctatcccacgtgtacgattgctcgtagttatgcaatttttatgtaattttggtattaccggtataggtcctatattgccactctacattaaacactatatgcaagtaaatgatgattttgtggctaccattgtaggtgttattatctttggggccggtctgtttagtgcactagcatcgatttcaatcggtcgcattactaaatggatgtctatgccgaatatattattgacggccacctgtggtgtaggcggattttttatcctccaatatcttatgccaaatgtgtggggcttaggtatatttagaaccattgcaggattctttatgggttttattacgcctatagcgaatactttgatttcaaaggctgttcccaaagagcggcgaagtattgtctttggtgctgtatctagtgtagccatgatgggcaatgtgttgggccctatgattagtggtatgatcgctaattggtttggttacggcatggtattttggagtactgctagtatcttttttatagccgctatatttgtgtggcgtagcctgttgcatgagagtatctagatgtctggatagtgacaggtttattgtttgagattatgtgtattgagagagttcatcatgttattaaaacaattggagtattttatttctgttgtagagcataacagctttacacaggcagcctatgagcactatgtgtctcagtcggctatttcacaacaaattaaatccttggaggctagtcttggcgttccattgatgatacgtgaaaagcgtagctttcatctaacaccggctggtgaatatttatatcggaatggtaaacagctgatgacgcgcgtcaaaaatttacaagatgaagacggtgcgtgtcggtaaaaatgagcgtaagtatttgcgtattggctatttaaatcgctatagtggcattgcattgcaacaggcattaatgcgcactacaaaacggtatcgtgacctcgatgtgcgtatgtatagtggcagccattctgaattgaatcaaatgctcgatgataatttggtggatattatttttaatgattattggcaaattaagtcggataatgattatgtagcatattctattagtaaggccaccgttatagcagaggtgcccaaggggtataccccggaggggtctgtagagctgaaagaattattagatttgccgttaattcttgtatgtcatgatgaccaacggttagatgaagaggaaaactatcgaaaatcgatgggatttatgggatcgttcctacaagttaaaaatcttgaagaagcccgttttctcgttggtgctggacaaggtatattattggtagaccgattcaagtatttagtggataccattccaggtattgagcgaaaatgtatattaaataatggtaaacctatagaaaaggattactatttctatgtgagttcacaaaatcctaatacctatgcagaggcatttaaagatatttttctacaggtcctcgatgaattttaaataacaacatatatgaataaaacaggtatcgcctaaaacctcacagctttatggtgtagtgatttcaggtgatacctgttttgtgtttatatggacagcatcattagaatgccatcatagacgagctttatgccatatatgattaatacggtaccgcatacgcgattgatccatacgagatgggatatcttaattttcttagctagtacatacatggttccagcaaggaatccaaaccaaatcggtgtcatcgcgaggaatccaaagaagaagtgatatatgttttcagcaggaatattagcgcgaaaggcgccgagcatcatggatgcatcgatgactgcttgcggattgccccatgtaacgagaagtgccattaacaggatatttttgatggggatgttcgtatcaacctttttaagtgaaggtgtagttttaaatgttttgtatcctaggtaggctacgagcaagccgcctgcaatgagaatgatcaggttgaagactggccatgcctcgaggagcgccccaatgccgtaaaaggccgccgtactcaaggtcatatcgaatagcccgataatagtgatggttaacaggatgcgtggcaatggttggacgagggccgtattgatgataaatagattttgcatcccaatcggtgcaaacgtggcgagacctactaataaaccttgcaggaaatacatagataatcctcctttcttgatggataatacgtttaggtaaatttggtacgtataataaaagaatagacccctgtgtagtgttataaagtactacatagaaatctattctgtattaaacgaagctttattctattttaccataaaccgataacatgttgcatccctaggctgacgagggtgatgcaaatccagcatgcagcgcctaatgcaagggcactaccaccagatttgataagcttaacaagatttgtattaagcccaatagcaaccatggccatggtgataaagtatttagaaatagttttgaatatgtctaagaagtgaatatctacatttgcataggacaatacagttgtaataagagaacaaatgacaaagtaaagaacgaacttagggaagatagctgcaatattaacagattcagcgttatcgcttgccttagccgcttgtttggctttgtacacttgataactagcaagacctaaacagatagggatgattgccaatgtacgtgtcaatttaacgatggttgcatattcaagaacttgcgtgcctgtgcccttcatgctatcccaaacagcagcagtagctgttacggatgatgtatcgttaacggctgtgcccgcaaagaggccaaagcccatgttagacaacccaatagcatcgccaagaggtgggaatatgaatgcagcgactacgttgaagaagaatacaacggaaatagcttgtgcaatatcttgatcgctagctttcacaacaggcgccgccgcagcaatggcactaccaccacagatggaagaaccgacaccaatcaaaacggctgtgttagaatcgatatgcgtggctttgaatatgatgtaagaaatgataagcgatgtggcaatggttgagatgataattggtaaggaaacccaacctacatgcaatacttgggtgatgttaagaccaaagccgagaaggataacggcccattgtaggatttttttagacgtaaatccaatgccggagcccgttttttcttgtttccaagatgtgaataaagaaccaataataataccgaggataatagcgaagattggactgccgataaaatgaaaatattgtcctaatagccaacatggaatggctagaattgcacagagcaatatgcctggcagtgtttttgcattgatacccatcataaaacctcctaactgtacctacttggtacatacatcgctgtggtatcgcgcaggatgtataaataaactactacttaatagtaacataatcgggggaattaatcgagggggattcctcattaagtatcttgtatacatagcttatagtattgtatcttatggtgaaagttttatataatcttatacgggataattatacttaatgaaatatgattcctagtaaaatacgtagagaacatcaacatgtctcatagaatatgcgaggtgcattatgattgatattaatggtattattgaaaaaaacaaagaatatgtagctaaacatcctgagcttgctcaaaagggtttaactagtcatcctacaaagaaattagccattgtaacatgtatggatacgcgtttagtggggatgctcgaagaatctttaggatttgatcgcggcgaggttatcaccattaagacggccggcaacagcgtaacgcaaccgattgataacatcgttcaaagcttgcttgtatctacatacggcatgggcatcgaagatgtaatcgtcatcggtcacgaaaactgtggtatgattgacttttccgcagaacaatttatggaatctatgaaagccaaaggcattaatgaagatgccattcgcatgattgaaccaggtcttatcgattggatggaccgtttccacatttctgaagaaaatgtacgctatacagttaaattcttgcgtcaccatccattattcccaagaggcatgggattctacggggggatgatggatcctgatacaggggaattccgctatattgaggtttaatcatctactcgatggggccctattacaattctacatttaggctatcaagagccacgcatactctctcgctccaccggccgggtctgactacggcctgcggccttcgcagggccaaagtcgcgcgagagtatgtgtggctcttgttataactgtagatataataaggtcccatcgagttttcttataaccacaatgtagcggaattcctctacatttaatgagagagaacaccggccgggtctgactacggcctacggccttcgcagggccaaagtcgctgcgggaaggttatctctgtttctatttgcatttgatgtaaataagcctcatcgggtcatatctaagcgagggagagtcgctgcgagggtatggggggctcttgttatagctgaaaattgtcaacctgtatagattgtatatagttgactgttctatttgtaagttttatactgtaattaaattgtcaactaattatatatgcatagttgttaatgctgattcgatatggtaaagaggtgctcgtatgagacagttaggtgtttctattattggtacagatacggatgtaggtaagacgtttgttacaggtttgcttggggcgttagcagtggacgatggttttgatgtgggcatgattaagcctgtgtcgtctagtgcggttccgttttctcaatgcggaacgatggatgaagatgaaatatgcatgggtcttgaaagtaaggatgctacatatttgatgcagtctgtaggtattcctgagtcgcgtcgtcgcgaggtgaatcctattgcattggcaggggattattcaccgcgtttggcggcagagttggccggtgtggacatcgattatccagagattgtaaatcatgtgaaaagggttgtaaatcaacatgatattacatttgtagaaggggctggtggaattacaacgcctcttactaaggatattacgtttacaaatcttatgacggatattgcatatcctgccatattgattgctgatgggcgtctaggttctatcaatcgcgttgtgttaacgtatgagtatgcaaaacagcatcatattgatgtaaaaggaatcattgtaaatgatacgactgtggtggatccattcttattaaagacgaatattgaggatatggaacggtataccggtattccggtgctcggtgtacttcctccatatcaaggacctaatcaagcgcatatcaaacttggttgggggcgttcgttcttagattcggctaagatttggcaaactgtatggggcatttagtgaaagctctatatacaaggaatctggaattaagtagatagtatagatataaaatcttaagtatgaggtgttatgatggcagagaaacaactttcacaaattgcacaatgggaccacgaatttgtatggcatccatttacgcaaatgcaagactggttagcacaagaacctgtagttatcgaacgcggtgaaggcgtgtatttgatcgatgacaagggtaaaaagtattatgatggtgtatcatccttgtgggttaatattcatggacataatcatcctgtgcttaatcaagcgttgaaggaccaagttgataagattgcgcatagcacattgctcggattggtgagccctccatcagcgcagttgtgtaaagaattagttgaattggcaccagaaggtttggaaaaggtattcttatccgatgatggtagtacggctattgaagtcgctattaagatggcgtaccaataccgtcaattagtaggtcaaacaaagaaaacgaaatttattgcactcaatgcgggctatcatggtgatacattaggtactgtatctgtaggtgggattcagttgttccatcaagtgttccataatttgttgttcaaacctttaaccttgccaagccctggtgtataccgtgatgtagcagatcgagataaagcatttgaagattccttagcagaattggaacgtatcctcaatgaagaaggagacgaaattacagctctcgttatggaaccattagtgcaggctgcggccggtatgcttgttatgcctcacggctatttaaaacgcgttcgtgagttaactgctaaacatgatgtattcctcatcgttgatgaagtggcaacaggctttggtcgtacaggtaaattctttgcttgtgaacatgaaggcgtatcgcctgattttatgaccttatccaaagggattacgggtggttatttgccgttggccgctacattgactacaaaacgcgtattcgatgcatttcttggcacatttgaagaaaagaaaacattctatcatggccattcctacaccggtaatgccttggcatgtgctgttgcattggcttcgttgaaagtattccgcgatgaaaaggttatcgaaggattatctgcgaagattgaggcttttacaaaggcactcaaacctatcgaacagttaaaacatgttaaagaagtacgtcaacgaggtcttattgtaggtattgaacttgaaaaggacgttgctactcacgaagcgtatcgcccaaatgatgcggtaggtgcaaaggttgccgttctagctcgtgaacaaggccttatttgccgtccaatcggcgatgtggttatccttatgccaccattggcatccacggtggaacaattggaagacatggttcgcatcgtaggtgaaagtattaaacgtgccacagaagaagagggcgtattagaagatttgaagccaatcattctataataaaaagcattttacttgcataatgtaaaatatattctatacattctcaaaatacgatgattattctgcatatctatgatactatatatgtatagtatcatagatattcaaaggaggtcatcgtatggacatttatgtaattatgcaagtcattattttgttcggtgctatcttcttgggcgtacgcctcggtggcatgggcatcggctatgctggcggcctcggcgtcgtattgctgagcctcggtatggggatgtttccagggcaaattccttgggatgttatcctaatcattatgtcagccattgcagcgatttgtgcattgcagttggctggtggtttagattatttagtacgcattgcggaaaatatcttgcgtaaaaatcctaaacacatcaactatttagctcctacagttacgtatttcttgacaatcttagctggtacaggtcatacggcattttctatgattcctgtaattgtagaggttgcaaagagcgagaatatcaagccgtccgtaccactatcgattgccgttgtagccagccaaatcggtattaccgcaagccctgtatccgcagcggttgttgctatgagcggattccttgaaccgtttggtgttagctatccaacattgcttggcatttgtatttccacaacatttattgcggttatgattactgcctttatcatgtcgacctttacgaacaatgatttgtcttctgatcctgtttaccaagaacgtttggcagcaggccatgtggcaccacctcgcgaaaagaatacggatttccatctaaaaccaggtgcgaaaaaatctgttttgatttttttaattggtatcatttgtatcgtattctatgcaacagcaatttctaagaatatcggtattattaaaccggttatcttcggccgaaacgatgccatcgtcggattcatgatgattattgcagcggctatcacattcttctgtaaattagatacagcacaacttgtcaacacaagtacattcaaatctggtttatctgcttgcgtctgtgttctcggcgtagcgtggttaggcgatacctttgtaaaaggtcatatccctgaaattaaagccatggcctctagcatggtaacggcatatccattcttgttagcagttgccttcttctttgctagtacgcttttgtatagccaagcagcgactacacaagcacttgtaccggcagtaatccttgcgttaggtattacaccggaaaatacgggatctgtatatatcattatcgcatcctttgcagccgtatctgcactctttgtactacctacatacccaacacttttgggggctgtacaaatggatgatacaggatcgactcgaatcggtcatctcgtatttaaccacccattcttcatcccaggcgtacttgccattgctatttccgtagcccttggcttcgttgttgctccattgatgttgtaattggtgaaagcgtataaaatcctatactatgcataatacacagggcctagtcacatacgactaggccctgttaactgttgtgcaatggatacattattggaaaaatgctatactatacataagagagggatatatagtatggtagagaaagatgatataggagcctattatgtatacgatttctatcaagctagatatgaatcgcatcccgccggaagcattcgaggcattgagagagaagcatcatatctggtataaaacatattttgatgcaggaaaatttttaatgtttggtacacggccagatgattctggtgaaagccttattatcgctcaaggaaccgcagaggacttagaagaggctgtacaatttgacgcatattatgcggagcaattggctacctatgagattcgcgaatataaggtaacattgttcaatgaagcgattaaaaactatatagattgatattagatatcccatatgaaagggcccctagtacattagactaggggcccttttggcgttttatctgtttttacagtccttgcagattcccgcaatttctaggtgatgctctgttactgtaaaatctacatctgtaagttcctgtggcatttctacgacggggcaggtatgtagaggtatcatagttccacatttcgtacataccgcatagtgacggtgcgtatggggtgtaatttcgtagtacgccatgtcgctacccatgatggtggtacgtgtaacgatatcttttgtttctaataactcaagggtgcggtaaatggtagacatccaggtggtgctgccatcgcctaatcgttcagcaatttcgatggcggtaatcggtttatccgttgagtttaatacggaccaaatagcctcgcgctgtttggtcttttttatgccttctggccaatgtattgtattcataataacgctttctatcatggggtaactattaactgtatgtactcttgtacacatactatttatttactaaattgcatcctccgaataatggatttaatattcttgatgatgagtactaccaataggatgaataccgatgtaagtgatacaaagccacctggtgccacgttaagataataggatccgaataggccgataatcatggctagtaaactaaatccaatggagcagagtaaggttgttctaaaacctttttccaattgtaatgcagaggctaccggtaaggcgatcatggcacttaatacgagaacgccgacaattttgatggaaatggatacggctgccgccattaagatagcaaatacatagttaatcaaatccacttttacacccgctactcgtgcggcctcttcatcgtaggcgatatagagcagtgagttgtagaggaaatacaaggttaacacagataatatggtaagtactgcaatgctaatcatatctgtagtatttacggttaaaatgctaccgaagaagaacacgttagcgttagctttcagcttgcccgaactgatgagggtaatggctgtaccgatgctgagagataagatgatggtaagaattaaatcaagatgatgagaaaagtattttcgcaagaactcgataagggcgccgcagatagcggtgaatatgaaagcccctaatatagggttcgtattggtcaataaaccgagggtaattccggcgagggatgcgtggctcatggtgtcgccaatcatactggaccggcgtagtaccataaatataccgatgcatgggcataatagagaaatgcagactgctacgaagaaggcattttgcatgaaatcataattaaacatggcgcacctccttagatgttgtatcatcagcctgagcctgagcctgagcctgagccgtcacgtctgtaaagcaggaacagtttttatggtctacaggattgcaccccgtattatgcatgatttcgctagcatattgttcaggggagcagagatgaccttgaccatttgcaatatgatagatatttgtcgaatttgcaagggccatttctaagttatgttctacggagataatcgtaatatgatgctcttgatttaatgagcacaagagggcataaataccttcttggctcttgcggtcgatgcccgttgatggttcatcgagaatgataaggtctgggctaccaataagggcccgtgcgatagaaacgcgctgtgcttgaccgccggataatttgctgatgaggcggtctttaaactctgtcatatgtgtgagctcaagaacgcgattcacttcatgcttatctttgatgttcaatagcttgcgataggaatctagaatttcatggactgtaataggaaatccagcatgggagaaatcattcttttgtgatacataacgaatattgttcgtgttgcatgtgatggaaccttttacaggcgttagaaaacctagaatgaggcgcaagagggtgcttttaccagaaccattatcgcctacgatggaaatataatcaccgctatgcacctctacgtttaaatcatttagcacatagggcggttgaccttggtatgaaaaataaagatgttgaattgataacataaaaaccacttttctgattgacaaaattattactacgtttatactataactatattacaaatgcaactgagtcgcaactgcaattaaagaatactatatatactataatagcatgagcactcaggatttagaaaaaaggaggcctactatggtcaagaaactggtattgttagtagttggcgtgctgatggctgctttatttgcaggctgtggtaatgatgcgccaaaggaacaagcaggtaagaaaatccaagtggtaacaagttttaatgctatgtctgaatttgcgaaggctatcggtggcgataaggtagaggtatctacgattattccggatggtacggaaccacatgactttgaattaaaaccagagaatatgaaacaattagcatcagcgcaagtatttgtttataacggactcggcatggaaccttgggcgcaacaagcgattgatgcggctaaaaacgacaaacttgtatctgtgaaagcatctgacggtgtagaggctattaaaaacacagatcctgacgaaattaaagaacatggcgcagaagatcctcatgcatggttgtctttgaaaaatgctaagatcgaagttaaaaatattaaggatgcattggtaaaggtagatcctgctaataaggattattacgaaaagaactacaatgattatgtagcaaaattagatgcgatgattcaaaaatacgaaggtcaatttgcaaaagctccacacaaaaactttgtaacaggtcatgctgcttttgcatatctatgccgtgactttggattagaacaaaatagcgtagaagatgtgtttgcagaaggtgaaccaaatgcggcacaattggctaaactcatcgaatactgcaaggaaaacaagattaccacaatcttcgcagaagaaatggctagtccagaagtatctaagacattagctcaagaagtaggcgctaaggtagaaactatttatactatcgaaagcaaggaagacgataaaacatatcttgaacgaatggatgataatttgactaaaatcttaggaagtttgcaataactttttatgagtaaaattaaactatttataacataaaaatataataaaattaaaagcaaggtatattctataccttgcttttatgttataatgaatgagcgtttcatgaaacaatgtactatttatgtgcattgacgcatactttgtattgtgttgtattaataagtattaagaggacatatgattgaattctttgatcgattagtagggcctatcgatacggatggcgtacgcatatatcgtcaacgtaccagcataactcaattagtcgtgatgatggtgctagccgttatatgttaccaattcaccgctataggtgattcggtatatgcggaggctatgaaacacttcatcatgaatcctacaacatttatgaaaattgaacaacttcctatggttaatatcattgaaatcaatggattgctacaaaagttgagtacgacgacacctctgtgggatgtgagcagatggctattgctgattgtgaaagctttagttatggctatacttatcagtggatatgcattatggcgtgctcgtcattgctatacgatgactattttaaccggtgtattccactgtattgcatatgcgcaagtggtaatcggtatctacatgttgagcattggtgtactctttgctttcgctaaagcgcctgtcgtcctcgtgttgttattgggcgtatttcttacgattatttgccttcttcttaccatgtccttaatcaccgtggtaggacgtattgtgggggcctccgtttcgggcaatgcctttgaaggacttctcgttatatgcggtgcgtacatcatctgggtaggcataaaatttttaggcatactactattttaaaaagacacattccgttttttggaatgtgtcttttcatcgttatatagcaactacgcatgatttgtccgataactcttatttgtcatggttgttttcatattcattaaataagaatgctacattatcttcatcgtattcgatttgttcagaccatcgtctgatttgttctggcagatttccgaattgatgtgttagcaatgcgatgaatactgtggcgtcaaaggcatatcgcacaaggctttctaacgagtattctgcaagcatatcaatttggcggtataagatgtattgatataccttgttgagtgtggatacatcgatagtgtcggccttaagtaagtccatcgtagttgatgcctctgtcgatgacagaatggcctctaaatgggctagttgttttgtccattcctcatcgataggctccgttttcttatatatagtaactaactcttggcagtagtggatagaatgattgagtgtaaactgacaaatagcaggattaatacctaatgctaagaggtcaaagatattttcgagtacgggacggtcttccgcagtaaattcgccgtcatcatcttcgatggtgaattgcaattgatcgccttcggtagctagtaacttttctaccgattcttcgcaggatagaccgacgccacagagctcgaggtcttcgatatatttatagaaccgcggatgcatatgacaggtatcgcataaactatcttcgcctagttctaagaccacgcggcacaatccatcttcccgtagcaacggacaggtaggttgtttgtcgctaaacatgaaataatagccttcgtcatcgacggtcataaatttccgtaggtcttcacctaatggtgtaggcagtgtttgatataatttagctgtctcctcatctacatcgatagtccacttttgacaacatgtatgatgacattgattggatttgcattgaaatgtatggtaaaaggttggatataaagaaatcatagtactcacttgtatatattattaactactgttttactaattaaattgtaacatatgctatctattcgtgggtgttattttagattatgattttgttcgtgaaagccctaattattgtgtataatagtagtatatggaatatttactaatactatttatgtaggaggaacttatgaaatctatgttcgtaaaaggcggtattgcattggcactagcagcggcatttggggtaaatgcaccagttgttgatgcggctagtattgtaccggtacaaccgacagtagcagttgttgatgctaatcatgcagccattgtaggcgccaatacattgctcaatgctttcattcaacaacatccaaaagcagcgattacagaaattgcatttgatggcgaagatggtcaaattaaatatgaagttgaaggctttgattcaacaggtaagtatgagttgaaatacaactacaatacaaatcaaattggtgaaacaaaagaaggcgcatacaaggttggtttagagaaaaaggcctttgatcctactcgtattttaacgccagacgcagttgtaaactttgcctttgctcaaacaaaaggccaagcaacaagccttaatagctggtctgtaaaaaatgaaaaaggtcgttttgtatacgatgtagcatttggtgccgctaatcatcaagaaattgaagtgcatgtagacgctttcacaggtgaacttgtatctgtaaaaggcgtaaaataggtgtatttgacatcttactgcaataggagtaggatgttacttacacatgctggtatagctcagttggtagagcggctcattcgtaatgagtaggtcgtaggttcgaatcctattatcagctccatctaattttatgaatttctgtgagtatcaatgaataggatagattaaacaaatatagatagtacctactctattgatactcttagatattcatggttcgatatgttttttatacttatagtatcaaaagcagtattactggtcatttgaccgaccgcttggctattgccactctgagtcgggcgcccagtagtactgcttttttgtcctataaccctaaaatcaactaataacttttttagtttaaggggctattttgttacagcctcttttagttcttgaaatgttgatagataactttcaagtatctattattttttacatatctatttagttgtataatttataataaatttatatttaattaaaaaagctgatatgatacaataataaaaataaatgtgatttagatgtattaggagagaaacatatggaacgaaaatggtatttagatctttgggctcttattagagagtcttttaaacgtggaattccggagattgttgaatttggcactattcaaagaggctttgcctgttctatagggatgcttgttattaaccttttggtaagttggagtctgggctttggactgtcttattttttaggcaattcacctttacagctaggtgttattttaggtgtcatggctggagcaggtatttttacagtagttttttatgcattaatggcatttgcagtattagccatttactcagttattttcagtcaaatagctaataaatttggggctcatactaattatgagtctatattaaagatttgttggtaccaaggtgcatattctatggtaatatcccttattttatccattgttcaagcgattctagttcttattgttaatggccttaatttagatgtttatgcacctgatattatcttatatattattggattctcttattggatactccaagtggtggcctatatttgggggttctgggtgagcttgacccttgtggcgcgtcaaatagaaaaaagacgtctttcaacttttggtatcggcattttagcaagtcttgttccagtagtttttgttggtatattagtaggcctagttatgcttgctgttcgtatgtaattaaatagttatcaaaataatgaaggggctgtaacaaaatagccccttgtttctgtgctatactatgagtgttacttccctagactggtaacagaaagggggtttagcgttgctagaattatttctttctttaatagtatctatcgtagcaggtgtaacttgtcactacatctgcaagtggctagatagatatcttagcaagtaactagcacatataaaaaagacggtattctcagtaccgtctttttcttttgcattaagcgatgcaaattatttctttctttagtcatttattatattacaacttatcaataattttgtaaagtattagatactcactcattctcattaatagtctatgtttttcaggcataggaaaacattcacttccgataatatatacttagtggaagtaaaaatggaagtaattttttagaaaaaccgacatccttaacgttaagatttttggtctaacattaaggggtcggttcatgtggattttttgtatgtgtagagttttttctaaaaatttactcatgaattatctagctatctatcatattgaaaaaattagtatttactaatatgggagaggttgcatagtatgggctttcatagaaattatcagccataatatgaattgataattcatgaatcgtgtttgtaaaaattctatagaaatttagccaaaaattcatatatatttcatgcaataaattgggtagttcagatatcttaatttacatctcatacgcggtggctaagatggtctcagttagccgccataggcctaggtggtaaacagatgtgattgtagctaggttaagtaatataacctatatgcgattaactatttgaaacttaggaggacatgatgaagaaatctatcgtaagaactagccttgcattggcagtagctggtgtattaggcactagcgtagttgcttatgcagcagaagccccacaagtacaacctgtgccggtcgttaaagaagcagtacaaactgcaccagtagtaaaacaagaagcaacaacacctgtacaagcagttactcctgctacaacagccccagttgttaatactgtaccagtagctacggcaggtcctgctgcgaaacctgcagtaaatgaaactgcacaacctgttgtagttcctgctgtagcaaaccctgcagctgcgtccatggatgatgatacaactcctgcagttgcaaaagcagataaaaaggatgcaaaaacaacaaaggttataaaagcggataaaaaagaccataaaacaactaaggtcgtaaaatccaacaaaaaagctcaatctgttccagctgtaaaggctgaaaaagcagataaagctcataaatagtctactataccaatacacatacatcgcgccatcccatcggcgccttggggtgcatacatctcccagtgcaccccgatgcgggccctttggtggttcagacatacattgactctctcctatgccgtctgtcgccttagggcctccttatgaagggttccctcccaattcataagtatatacatgatgtatataaatctctctctctcacaacacacaatacacacaacacacacaatccatatgtgtatggtataggagaaaaaaagcaccatcgaattttcggtggtgcttttacttttgtgggtgacattggaatcatcaatgtcatcctttttgtgttatatgtattgtcgtggcacgcgatcagagaagccacagaagatttcataaggaatggtggaggcgagggctgcaatttcaagggcagagatgctttcatgaccttgagaacccaatagtacaaccttgtcgcctggtttaaccgtaatcgtattaggtacagccaccatgaattggtccatacaaatacgtcctactacagggcaacgggtaccttggatgaggacggtaccacgattggataggctgcgtggataaccgtcggcgtagcctacaggaatagtagcgattgtcatcggctctggagtaatataggtagaaccataaccaatgccttcgcctgcttcgagatgttgcacgtgtacgacttcactgtggagggataggactggtttgaggcctaatcggtttggtacatcgagagatggcatgatgccgtattggatgatacctggtcgtgcatctgtgaatagactatcctttacggataatagaccggcgctgtttgccaaggagaagcgatagtccgcatcaggtctaaaggcacggatttcgtctaccattgtatggaatttttgcgcttgcccatgggcgtggctttgatctgctgcatcggcattgctcatgtgtgaaaagaatccatctactgcaagattgggataggattcaacgcgcttaatgaactccaccgcatcctctggtttaatgcctatgcgatgcatgcctgtatcgacggctacggcaacgcggataatcatatcgtgattgtcagccactttgttgagggcctctaaatcggtagattcgcaaacagcgggaatggaattcgtatccgctacaagttcaaaggattgtggtctcgttaggcctaataggtaaataggcaccataatgccagcattgcgaagtggtacagactcttcaggaatggcgacggctaaggattcataaccttcttctacagcaatacggcccatcataacgctaccatgaccatagccattggccttgataacagctgtggatgtactccattcagggaggctgtcttttatttttcgtaggttctcacgaactaagcttgtatcaatcgttaaatatgttggtctcatgatcatttcactcctaaaatacattacttttattgtataacttttagggaattaaacaatagtttttgtgaaagtttatgctaaaatttcatttgtattgatagtttaggagagattggtctttatatgcataggctatgatgaattagcatataatatgtagtagcttgtagtataattaatatataatacatttacccttaatagaaattgttaggaggatatgatgaacgaacgagttgtagtagttaacgctggtaagatgaattacgatcacttgctagatttttccgttttatcgaatgatgtacaagtgtatgatgatagcacaaatgctgagcttatcgaacgcattcagggagctagtgtagtggtaacaaaagaattaccggtaggggcagaattgctttcacaattccctgaatctgtaaaactcatcgtagaagctggtactggatataacaacatcgaccttgatgcggcacgtgcgaaggggattacggtgtgcaatattccggcctacagtacggaacgcgtagctcatacggcgattatgatgctccttaatttcgcgtctaccatgcagcaacaaatcggtatgcttgctagaggcgaccgtagtaattttactaaacatttacaagtgcctcacactgaagttaatggtaaaacattgggtatcatcggcgccggtcatatcggcatggctgttgtgaaggtggcaaaggctttagatatgaacattttaattcatacgcgtacgccaaaggcagatggcgatggcattcgctatgtaagccttgatgaattgctcgcgcaaagtgattatatttccttacattgcccattgaatgataagacaaaacatttgattaataaggatacaatcgctaagatgaaatctaatgcggtcatcattaatacgggtcgtggagcactcattaatgaagccgatttatgtgaagctcttgcggctaaacgtattcatggtgctggccttgatgtacaagaggtggaacctccggctgaggatagccctctatatacattagataatgtcatcatcacacctcatatgggttggaaaggccttgaaacacgccaacgtttggtaggcattattcgcgataatgtacaagcctttttgaaaggtgaaccgattaacgtcgtttcttaatagatacacaaataccccctgaccggttgtgtggtcagggggtattttcgtttagggctagtatcatagatcaagttttaatatatattatatatatatatatcaagggaggtagttatcctcaaacttgattatgattagtttgtgttttgatgggactccaccaatgtctacgatatgcttttatgccttctacaacggttttgctcgctttggcggctaagtcctttgtagcggctgggatgccatcaaggcggtaggtaatacctaattccttgtatttagcaacacccatcacatgatatggtaaacagtcgacggcctgtaagttgcgtagtgagcctaagaaaaagcctagcctatagtgacgatctgcgttgtctgtaacggtaggtaccaccacatgacgcacccaaatcggcacatttacatcagctgtcagttttgcgaattgaaggattggttctaaaggctgtgcggttagccatttatggacagtagggtcgatatccttaatatccaaaatgacgagactcgttacgctcagtaacttacggtatgccacctcttggtggggatcaaaacaaattccacttgtatctaaacaggtatggacgtttctttcactaaaatatgtgaaaagctcgatgacaaagtcaatttgcatcaatgcttccccacctgtgacagtaatgccaccgttcgtatagaactgacggttacgttcgtattgctgccaaatctcttcgacggtcatgaatttagcttcgtcgctatcctcattccacgtgtctggattatggcaataggcacaacgcatggggcatccttgaaggaaaaccaccatgcgcatgcctggaccatcaaccgtacccatcgtttctagtgaatgaatacgtcctgtcatagaaaacctcgattagatttgttgatggaatgtacgggaaataacttcatcttgttgttgtttcgtcaatttgttgaagtgtactgcataaccagatacacgaacagtcaattgagggtacaactcaggatgtttttgagcgtctaacaatgtttcacgagtgaacacgttaacgttcaaatggtgaccgcccttttgggagtagccatccaataattctaccaagttatccacttgttgttggttgctcatgggtattcctcctttcaaccaaaatacgagtactgatgccggtgaaagcatacaatacggtggaagattatttatcttcctctatagtaacatttggttcgctgcaagcgaagtttgtattgctgttaggcaattgagaagggtctaactcaatatcaaaatcgcctacggatacaaatgtttcaccagatttacctaatgcgtctggaacgatggagaaggtattggaaataccgtcagagcaatcgcgccatggcatttttgcaacggaagataacgaagctacggcaccgtgagagtcacgaccatgcatagggttagcaccaggagcgaaagcttgaccagctttacggccatctggtgtagaacctgttgcagtaccatacactacgttagaagtaattgttaacaagctcatagtaggaacggattgacggtatgtagggtgtttacgcactttgttcatgaatgtggaaacaaccatggaagccaagctatctacacgatcgtcatcgttaccatatttagggaattcaccttcgatttcgaaatcaactgcgatgccgttttcgtcacgaataggttttaccttagcgtatttaatagcggacaaggagtcagctactacggataaaccagcaataccagttgcgaaccaacgagttaccttgcggtcatgcaatgccatttctagtttttcataagcgtatttatcatgcatgtagtgaatgatgttcaatgcgtttacatatacgcctgccaaccattccatcatgtcgtcgaaattttcccatacttcgtcaaagtctaagtattcggatgtaataggacggtatttaggaccgatttgtttcttaagtttttcgtcaacgccgccgttaatcgcgtaaagcaagcattttgctaggttagaacgagcgccgaagaattgcatttctttaccaatacgcattggggatacgcaacatgcgatagcgtagtcatcaccagagttcggacgcatcaattcgtcgttttcgtattggatggaagaagtttcgatggataatttcgcacagaaacggcggaagccgattggcatgcgaggggaccataatacagtgaggtttggttctggagcaggaccaaggttagtcaatgtatgtaggtaacggaaggacattttggaaaccaatgtacggccgtcagtacccataccaccaatagattccgtagtccaaacagggtcgcctgtgaacaagttgttgtattcgtgaatacgtgcaaagcgaaccatacgcaatttcatgatgaaatgatctacgaattcttggatttgttcttcagtgtatgtgccgttgcgaaggtcgcgttcagcgtagatatcgaggaatgtagagttacggccgatggacatagcggcaccattttgttctttgatggcgccaaggtagccaaagtaaatccattgcatagcttctttaacatctttagctggttcggaaatatcgtaaccataggatgcagccatttctttcaattccttcaaggaacgaatttgttctttaatctcttcgcggtcgcggattacgtcttcaagcatatcacccatagtgatattgaattcttggtttttctcttcgattaagtagtcgataccgtatagagcgatacgacgatagtcaccgatgatacggccacggctgtatgcatctggcaaaccagttacgatgtgtgctgtacgagcggcacgcatttctggagtgtaaacatcgaatacgccgtcattgtgcgttttacggtgctttttgaagaagtcctctgtttgaggatccattttaaagccatattcttcgatggcagattttgctgtacgaaggccaccataagggaacatagcgcgttttagaggtttatcagtttgtaaaccaacgatagtttcaaggtctttgtcgatatatcctggcgcatgcgcagtgatgtgtgtagccacggaagtatcggcatcaagcatgccacctttttcgcgttcttcttcgtatagtttcattaccttgtcccacaattttgtagtacgttctgtaggaccaactaggaaggagtcgtccccttcatagggaacatagtttctttggataaagtcgcgtacgtcaatcgctttatcccacacacctgtgttaaaatctttccatgcagtatgttgcattttgcacctccataaatggatataactatagattttgatatatctagtgtacaatgtttatctaaaactcacaatatataaatgatatggattttcaatacatactatgcaaatttcgtaagaatagatattatttgtaatttaataatattgaaaacactatgtaaatatattgaaagtgtagtacttaacttgctttatttagatgtgtatatttgaaagaactaatttttgtattatctttaaataatgaaaatttgtatcaataaatggaaagtattcgatatattgtgatggatcttcttggaattgtagggtgttattatggtaatatttagatagtattgattatggaattacgtagaaaggtagatgctaatgacaaatcgtatgaaagccattttaggggcatctgccaccattgccgtttgggctacggcgtttccttttggtaaagtagcattgcaatcagtagatgcattgacactctcggtagcgagggttgtaggtggtgctatactcatgctaattattggtgtatttaagggattacatatacctacatcttggcgtgagtggggcatatatattctgttaggggctacaggaaacttcgtttaccaagtcgtttttaatgaagggttgcgaacaataccggccgctacatctagtattattatggctttgacaccgatgactacagcattgatggcattggtagtctataaggataaaatacgccctataggttggatcttcaccataactgcttttataggtgtggccgttattattttttggaattccactctgaccattccaatgggggccatatggacgttgattggtatgatactgtttgcggtttataatattctaaatcgcgggcttagtctgaaaggttataactctattactatcgctatgtggtccatgtttacaggtgccattatggcactaccttttgcagatcatgctattgaaatgattgtagccgcaccaatcactgcgaagcttgctatggtatacctagcattcttttccagtgcattaggattcgtattctggagctatgcctttgaacatgctgaaaaagtttcggatgtaaccaattttatgtatatctcgccaatcgtggcagccgtagtagcagcctttttattaggagagtatcctaatatgggactctatattggagcgccaattatactaggatcattgtacttatttaatcgatatagataaataaaagaacctaaacctttttgaactgcaccccaaaatttggacacaatttttggaggtgcagttcatttagttttgaggttcttttttgtgtttgacagtcattataaattgtagtaatctaagtatacaattaaaacatactttaaagatatgttttagaaaaatattaattcctactaatatatagggaaagaggtggtacagtgattgctatacgaaatgtaacgaaagagtttgacgttaataagcaaaaggttactgcattatctgatgtaaactttaccatagaaaaaggcgatatatttggcattattggctttagtggagctggaaaatctacactgcttcgcatgattaatgccttagaggtacctacctctggtcatgttgaaatagatggtgtgaatatcaatggtttaagttttaatgagcttagaaaggttcgtaagcgcatcggtatggtttttcaacagttcaatttgttgaatgctaaatctgtgtatgataatgtggctatcccactaattcttaataaggtgccaaaatccgacattgataaaaaagttaaaaccttattagactttgttgatttgggcgataaagcaaatgcatatccaggagaattatctggtggtcaaaaacaacgcgttggtattgcccgtgcattagctacagatccatccatattgctttgtgatgaagcaaccagcgctctagatcctgatacgacagaatctatattacaattactagaacgtgttaatcgtgaactaggagtaacagtagttatcgtaactcatgagatcgatgtaattcagaaaatatgtaatcgagttgtagttatggagcatggaaagctcatagagagcggatctgtacttgaggtgtttagtaaacctaaatacgaaacaacaaagcgatttgttaggactgtaattcctgatgaaattccatcaacagtgaaacatacattagcttgtgataaaaggccatacacaattcttaagatgcatttcttagggaataatacgacagataatgttctatatcatattaataaaacctttgatttagaaacgagtgtattatttgctacggtaacagagttagaacatactgtacttggtatattcattgttcagtttattggtgatgatcttgagatgggtaaggtaaaagagtatcttatcggtcaaggtattgaatggcaggaggtgacactataatggatttcttcatgcaagaacttggtgttccaggatcgcagttattattagccgcagaacagacattatatatggtgttcctatctctattcattggtacagtactaggtctaattatcgcagtcacactggtagtaacaaatcctaatggtatcgttaaaaatagtattgtttataccattacaaatacaattgttaatattgtgcgttccgtaccatttatcattttgatggtgtttatattaccgttaactaagatgattgtaggtactcgtgttggtacaacagcggctattgtaccacttgttatattcattgcaccttatcttgctcgactctttgagaactctattttagaggttaataaaggcattatcgaggctgcacaatcgatgggagcctctcattttgaagtgatttggcattttcttttaccagaagcaaaaggttcgcttattttatctattacaacgggtactattggtctaatcggtgctactgctatggctggtgctattggtgctggtggtgtaggtgatttggccctcacctatggttatgaacggttgaacttcccattgatgttatttaccgtagttattttgattatttttgttcaaattattcaaacaataggtaactattttgcacgtcgtgcgcgtcgttcctaatttgatgaaatagattttagttatattgattgtgaaagtataggagaatgtactatgaaatttaaaaagcttcttgcccttggtgcagcattagtatttagcgtagcttttatcgcaggctgcggttctaataatagcgataatggtgctaaaaaagaattaacctacagtaaatctcaggggccttactctgaattgtttgaaaaaggtgtaaaaccaattttggagaaacaaggctatacctttaaaggcgtagatatgtctgatttggtacaagctgaccaagtgttaagtgatggtgaggttgactttaacgttgaacaacatacagcatacatgaaaaactttaacgaaaaacaaaatggtcatcttgtagcattaacaccaattccaacagtaccagcaggtatctttagtggttctaaaacatctttagatcaagtggcagatggcgacactattgctgtacctaatgatgcatccaacatggctcgtgcttatgcgttattgcaaaaaatcggttggattaagcttgatcctaacaaagatttagcaacagtaactcaagcagatattattgaaaatccaaaacatcttaaatttacagaaatgaaatcccttacaattccttctgtacgtactgacttcgattatatcgttattacaggcgctattatctataatgcaaaaattgatcctaaatctgcattggcaaatgaagacgtattgccacaatggttattacaactcgtagttaatgagaaaaacaaagatgcacaatgggcaaaagacatcgtagcagcttaccactctcaagaattcaaagactacatggataaaaataacaatggcctatggtttgtaccaaaaggtgaataagaagggatactaaatcgaaataaagtatcttggtgttctacttgttctctagataggttcatgatatacttttactagagaaacgtgctatgcatatgcacaaataagagaaccactgataagttgcagcttatcagtggttctttggcttataggacaaaaagtgtgtgtgaaaacccttataacactagatatttactagtgttataagggtttaatctttttctggagaagtttgagggtggacaaaaagtgtgggtaaaaacatcaattaacccttgtaattactgattaaaatgaggttatatcttcctatatataaacaaatatggaggaagagtttatgcgacaaataaaatgtcctgattgtaatgaaacatgtattaaacacggtgttttaaaatctggttctcagcgttggttttgcaaacattgtaaggtggcatttaccgttaaaattaataatttaagtaaagagttaagcctattcttgaattggttattcagcaccgatattcaagctgatatgcctggtaaaggtcgtacattcaggcgtaaaaccgctaaattttggtccatatggccattgccaccaaaagtggaagaagtacatgatgtggtatatcttgatggaatttacttagctaggaatttatgtgtattgatttgttgcaatgatactcatgttctaggatggtatgtctgtcgttatgagcatgctagagcttggcagtgtttaatggaacggattgccgaacctaaagtcgttgtgtctgatggtgctaatggtttgcctaaagcattacgtaaagtttggcctcatagcagtcaccaaagatgcctgtttcacattttttgtcaggttagacgatatacgacaagtagacctaaaacgttagcaggaaaggacctttatactcttgctaaagatttatttaatgtgaaaacaatggatcaagcttttatatggattaataaactttcggcgtggcgaatgacatattctgattttttacgagaaatgacgattgatgaattcggaaacaaacgctctacacatgagcgtttgcttaaagctgaatcatcattatggcgtctgattaggcaacaaactttatttacatttttggaatgtattgatattacaatacctacaacaaataatcgtattgaaggtggagtaaatgctcaactaagaagtatgttacgggctcataggggcctttcacttgaaagaagactaaaagcggtctattggtggtgctatatgcactcaccaagaccgctttctatttcagatatattaaattgtatgcctacagatgaatcgattgctgctatctacaaacggttatctgattattgccaaatagatcgttcaatccctcaatggggtgatgctcctgtttggaatgagctacatatgtctacagattttccaacttattgggattagtcacacacactttttgtcctataacccggttcttttgtttttacggaacaactcgaggctagttaccaattaacaaaaatagcaagtctaaccatttacaaatataataagaaattatatttatcatgaccgctaagagaagagaaacaaacgtactacgcataatgcacctcctttccattaccggatttggaaaggttggtaacatctttattttagtactaatatttatattggagtatattaaagaaatgattaatatcgatgcagatagagtatatatttatagagttttgaatatcatttttcacaaaaagttatagataattccttcattcattgttaattgctatatgaattttatatacttattcctgccacatagttttcgtatagttctttatagtgaccaccgcgttcaatcagttcgtgatgtgtcccttgttctacaatggtaccgttttctactacgagtaggaagtccgcattcttgattgtagacaagcgatgggcgatgacgatacttgtacgtcctttgaggagggtattcatagctttttgaacctctacctcggttctagtatccacattagccgttgcttcgtctaggatgaggatggttggatccgccaagaaggcacgagcgatggtaattaattggcgttgaccttgagataggtcatcaccaccttgtttgagtactgtatcataaccatttggcaaggtacggataaagtgatctgccatggcaagctttgctacatattcgatttcctgacgagtagcatttggcttaccgtagccaatgttatcagcaatagtgcctgtgaaaatccatgcatcttgcaataccatgcctaccgtattatgtaagctttcacgagatacatcacgaatgtcgacaccgtcgatggtgatgcggcctttcataatatcataaaagcgcatgattagattcactaaggttgatttaccagcacctgtagggcctacgatggccaccatggagccgccaggaatatggatattgatatccttcataaatacattggacggcgtatagccaaaatcaacatgttcaaagtcgatagtgcctctatgtgttgatataggaaatgaaatatttatatcatctgtactagactgcacatcgtctatatgaaccttagattggtttgtagacatattggcgcctaacgttagggtacccttatcgatttcagacggtgtatcaatgacttcataaatacggcctagggcggcagcagtttcttgaaattttgtcatgatataggagctgcgagatagaggatccgatacttgacctacgtagaggaagaaggcctgaatgtcaccgatggatattgagccacgcagtaccatgagacccccttgaatggcaacaaggcaataggtgatttgatttagaaacttaacgagcggttctacgagctgactggtgaaagcagcatttcgcatacttttaaagagattctcgttaagtatgtttacttgatgagtagtggtttcttttagtccaaaggtttggataagcggttttcctactacaatttcctctataccactattgaaagcgcctaaggcattctgatttctaaggtacacgcggcgcgctcgtttagatagccacgttaagcatacgatgccgaccagtataataccgataatggaggcccctaatatagggctaatccaaagcatcatagcagtagcaccaataatgccgataatggcggatacgaggcctggtacacctctaccgattgtttctgctacagtatctaaatcagacgtaaggcggcttaataaatcgccccgctggtgatcgtgaaagtactcgataggcaatgagtataaatgagtactcatgcgtgtacgtaaagcgagtactgtctttgaaccgatagaggccatcacgtattccccaaagtaggtgaataaggcatgcccactatagatggcaataagccagaggatgattgtatcaatagaggtaaagatagtattgatatcttgatctgtttgtaatccactaacaatagcatctaccactttaccaagtaacactggagcggagacctcaaacatagccgcagtaatgagtgctaagatgagaagaaagagccagccccattggcttttagattcgactaggaaacgacgtaatgggctcatgcagtcacctcctgagatgctaaaatctgttgatatacagtagaggtagtcgctagctcgtcatgtgtgccatatcctgcaacttgacctctgttaatgattagaatatggtctgcctttttagcagcacttaccttttgttctacagaaatgagagctgggcgattatccttttgcaattcttcgtataatgcactgcgaactgcacgttctgtggtgccatcgagagcagagaagctatcgtcgaatatgaataaatcaggtttacgcactaaggctctagccatggcaaggcgctgtcgttgaccaccagatagattggtaccactttgggaaaccatatactggtaaccaccttcaagacgattgataaactcatctgccttagccaagtggcatgcattttctacatcttctactgacagtacttgtcctgatgcggctccatatcgaacgttcatatcgatagttccagtaaacaaataagccttttgtggtacatagccaatatgagcgcgcaagtcatctacattccactcataaatggatttacctttaaagagaatatctccagattcaatagagaagaggcgagggatgaggttggtgattgtacttttaccggaaccgatatcgcccataatcgctaaagtttcgccatgatataccttaaaggagatattttcaagcgcaggggattcagcattgtcgtaacggaatgtaacgttgcggaattccaaaagtggggtattatcggttgcggttgcagttgcggttgcggttgccatagccgtagagttttggtagcttccttgattggtagaatgcttagtagattgagacattgaatttgtaatactactagcatatggttcagggaaagtatctgtattttcgtgttctaataactcacgaatacgagcgtagcacacgatagcttccgggatgtcgatgattacgaatatggccatgagcatgctcaataggatgaggtttgcatactcgataacggccatgatatcaccaacttgtagggcgcccatgctgacattgtagccgccgaaccagagaatagctacggtactcatattaaatagaatgagtatcgtcggtaaaccgatggcaaaggtttggcgcagttttttgttcagtcgggcggactctgaaaaaataacaatttccttgtcgttttcgtaggttctcctattgaaagctctgataacaggcatacctacgatatgatctcggactagatcagtaatatcatctagctttaattgtatagctttgataattggcaaggcgcgactttcaataaagataatggtaagtatcatgcaagccataacggcaaggatgacgagacctagttgccagctcttatagaaggtaagtcctagaccgacgcaaatcatgagtggcatagggaggatcatatttaaaccttctccgagaacagattgaattttttctacgtccctgcttgtgcgcatcaatatagtgccggtaccaaagtgcgtaaagtcacggagtgaaaagcattgtaatgcttttactagatcgtcacgcaataccttgcctacagatgctgagatatgagcactcatagcaacgcctagaatagcggataggacggttagtagtgccacaacaagcatgtttatgctagagctggtaatcatctctaggtcgcctttgaggacaccatcattgatgatggttgccgttaatgttggtatatataatgtgcctgccacggtgagtaaggaaagaagcgatactatggcagcaggaaaccataagggttttatataatgcataaatggtttcatgtgaatccttttgataaatcaataatttttgatatttatattatattgcataaaattaaaattatctagtaggatgaaatttattactaaaagtttattatcaattaataagtgttatgattaagtttatatcatcttattaaaatttttgatatactaaataggcatttttttttgtaatttttgttttgaagtagtaaggagagtttctaatgaagttgaattggaaattattcgcaccgcttgtagtagctattattgtatggctcatcggtgctcctgaaggtcttagcgcaaattcttggatttatgtaagtattttcgcaggccttgtggtagggttgattttagagccaatcccaccagctttcatcggtatcattgcagttaccgtatctatgttgtttaaggttggtcctgcccctgtggtagataaagcaaccggtgtcgctaaggcgattactgatgcgcaagctatcagctggggccttagtggtttctctaatgccatcgtatggttgatctttgccgctttcatgattggtattggttatgaaaactctggccttggccgtcgtattgctttgttcctcgtagcaaagcttggcaagtcctctttaggtcttggttatgctatcgctattacggaccttgtattggctccatttattccaagtaatgcggctcgttctggtggtaccatttatccaatcgtatctagtatttgtccgatgtttgactcctatccagataagaaccctcgtaaaattggttcctatttgaactgggtagcgttggcaactacatgtgtgtctagctctatcttcttgactggtgcggcgccaaatccattggctctagaattgtctgctaaatctggcatcgtagcggcgaactggggcacatggttcctcgcattcttgccagtaggccttatcttgttcatcatcactccattgttgacctatgtattctgcaaaccagaggtgaaaggctcccctgaaattgcagcctgggcaaaggatgagtataagaaactaggttccatgacacgcagtgaaatcttcatggccttaatttctgtattggctcttgtactgtggattggtgcttctacattcaaagtaaaccctacaacaacagctttgatcgttattatcttgatgattttcactaagattatgacatggcaagacttccttgctaacaaaccagcatggaatgttttgacttggtttgcgacactcgtacctatggcttctggccttaaaaatgtaggcttcttggaatggcttgctaaatctgctggtggttctttggtttctttagatcctacaatggcagttcttggtttgttattagcattctgcttgcttcgttatttctttgcttctggcactgcttatgtaacagctatggtaggcttgtttgctactctaattcttcaaattcctggtgttgatccagctcaagttatgttaattctgttagtaccgatgggtattatgggtatcctcacaccatatggtactggtcacagcccaatctggtttgctagtggctataacaaaggtcctgaattctggaaattaggcgctatctttgggattatctacctcgctatctttatcgtagtggggattccatggattcagttcgtaatgccacttttaggataataaaatagggccccacgaatcattctgttcgcactccagttcttcgcaagtcgcactcacagaatgttccgtgagtctttttttatcctaaagtggagtgactcactcagaggcaagtcgctcgatagatatattagggctttttcatacctaaaatgaacctctagattgtgttataataacgcatatagaggttgcatataaacgcgaggtatatatgtctattcttgaacgtacgatacaatcagtaatatttgaactgggtgcgattttaatcgggatgctagtcattgaatttattcctcatgaggggcaaccattgttgttgatgatattaatttcgttgactgcagtcatatggaatttcatatttaattggatctttgataaattagtaccaggtgatcgattggcacgaggtcctgtaattcgcacgattcatgctgtattgtttgaaggtctattattggcggctacggtgccaatgattatgtatatgatgagtatcaccctgtggatggcttttattacggatatttctatgacattgattatcttggtatacacctatgtctataactgggtatatgatcgggtacgtttattttttgtgaaagcttaatgtatgtatttgaggtaagtacctcttgtaaagtatatatcgtatagggggaggttcttatgtctacaaaatctattacaggcaccggccttttgttggccgtagccttgttagcgcaaagtttgcgtcttatgtttccatttattccaaatcagatcagtatgttccttattgggtctatcacatcggctacatttgtgcttgccacatggcgttatggatggaaaaatggtcttgttattgcctggattgcaccagttgtagcacatttacaaggcatgttaccattgccaccatttatttttattacaggattaggcacgacagcctatgtattagtcgcacattggttgcaacataaaccaaaacttttacttattattgtggctgcattggtgaaagcaggtgttctatttggtggatattcgttgtttttctctttattccaacttccaccaaagattgtaaataccatgctctttgtatctagttggccacaacttgtgacatcctcattagggattatattggcattgctcatcatgaaacgtgttaaataggttttatggttcttttataatacatcaaatagataataaaaaggtgttacacatcctcgttgtattgataacagctagtactgtttcaataggggatgtagtaacaccttttttgcgatattctattgttttttctttaaagacttaaggatgaagccacccacagttccagtgataccgaaacctaataggcccatgccaattgtatgcattaaaatactactttgattgtttttagaaatttcttgtgctgcttgcactgcgcttgtagcctttttggctatctccacattgttagctgatggatctggaataacaaataagattacgatggcaataattaaactaataataccagcaatgaataaatactttccacgttggtttactttttccataataccctctcctttatatattacgaaataagatatatactatttggtttaattatatactgtatgtatataaatgtaaattgataaatttgatatgtgggttttgggattaaaggattaatgagtccgataagaattaagtgaaaattatcggtttataaataatttaaaaaaagtaaaaaactacatgttttatttcaaagggaagtagatattgagaatatataaaaatacataaaaatacttaataattcaatatagcatatagatagtattcatatgtgattcacgttaaattcatgaaagtagaatggagatggtgtgtataagattgttgtatcttattaaaacattgattatttataagtaaaagagtctattatagtaaaagtacataaaattttccaatttttaaacttatcataaaaattgatgagtatatgaatatgttgaagaacaatggcaatcaagctatttttaatgtatatgaagagttattaatgaactttatatggaaaaaaagcttgtacatatcgtaaaattttgatatgctgtgtaagtaattaacaatataaatttttcttaaactgacttagatgttatttttgaagagaaaaaatatatttaggttaggctaaagagagaggcgaatagagaggctgaaaaattgtattgtatattgttaaggattttaatttagtgagggtgtaagatgagagaaaacaaatattccaaaaaattagcgtttgcagtattggctgctacagctgctgtaggcgtatccgcagtggcgcctgttagtgcggctgaaatccaaactgcacaaggttttatttttgcagcaggtaatgcaacagagtctccagatactacgcacaatagtgtttcttatggtactgttgcatctggtacagctactagcatcgcagttggtcaaggtaatagtattacaagtgctactggttctagcagtgcttatggtaaccaaaatacagttaatggtgaccaagctaacgcatttggtgatggcaatactgtagaaggctcttatgcacaagcatttggtgatagcaatgttattaatggtacacatgctattggctatggttacaaaaacactgtaggtgaatcgacttctaatttccgtgatcgtgattatgataacgaaccagatagtgcaacattacgtccaggagattggaaatctaattctgtagctattggttctgaaaatactgcattaggtagttctgcattggcagtaggtaatggggctcaagctaaaatgagtgaagctattgctatcggccacgctgcagatgctgaacgtacttggtctactgcaattggtacacgtgcaaatgcatctgaagttcgttctcaagctattggttatgaagcgcaagctgctggatacaaatcaaatgcaattggttctagtgcacaggcaactggtgcacatactaatgcaatcggttcttccgctattgcttctggtgaccatgcacaggcttatggtgcgggtgcacaagctcgaggtctacgtgctaatgcttttggctctgatgcacatgctacagctgaccatgctatggcaattggtgaccactccgttgcgactgatgcaaattcggttgctattggcttccaatctcaatctgctccggcaacagctgtaaataatgcttctatcacaacaactagcattacaagtggtgctccaatcgcaactcatacatatggtggttttgctggtgtaggttctgcaactaaaggctctgtttctgtaggtcaagttggtcaagaacgtcaaattaagaacgtagcagcaggcgaaatctctgctacatctacagatgctgtaaatggtagtcaattgttctctgtagcaaaggatttacaaaatcaaatcgataactctacaccaggtaccatcaacaataacattactaacttgaataatcgtgtaggcgatgtagaacaacgcgttaacaaagtaggtgcaggttctgctgcattggctgcgttacatccattagacttcaacccagatgataaatggacagtagctgctggttatggtcactaccataatgctaactctgctgcattgggcgctttctaccgtcctaatgaagatacaatgttctccatcggtagcacagtaggtaatggtaatcctcaattaaatgcaggtgtatccattcgtcttggcaaacgtgcacctgaatctcgttcccgtgtagctatgggccgtgaaattgctgaattgaacgcacgtcttcaagatattgaaaataaatacaataacttgttacaagtattgaatccacatgcaatcgatcctagcaaaactgctgaattcccagatgttcctcgcaatcactgggcttaccaatacattagccaattggcaggtaatggtatccttgttggttaccctgatggcacattcaaaggcgatgcaacaatgactcgttacgaattcgcaactatgttgtaccgtgctcttcaaaatggtgcacctatcgatgataacatgcgtcgtgctatggacgaattccaacctgaattacaaaatattcgtcttaaccattaccgtgttgaccgtatttctggtggcgataatgaccgtcataaaacagaacgtgttcgcgttaacaacgaacctaaaaaccaacgcgacgtatatggttcccgtattagccaataatatattgattataacttcccctcgagcttgtgaaagctccaaaacaggatgtatcctcgtgatgcatcctgtttttgtttattataaagattataaaacttcatcaaatatttatgtaaaattattgcatttagatacacatagtagtataattacatttatgataataaatatacagaatatatgtataaaatataaaaaatagtagtttgataaagatataaaatgagggcaagacaatgaaagaattcagacaattaacagtagaagatacagcggaataccataaggttttaattgatggttatgcagctattaaagattttccaatcacctttgatgccatcgattttaccgaagaagaatctaaagagtggattgaaacctatcctgtatatggattgtatattgacggacaattagtgagctctattacattctgcatgccatgggttaaatactctacaccggataaatttccacatattgcccatttcgtaacagcaccagctttcaaaggcaaaggctatgcacgggaaacacttggttatgcagaagagttgttaaaaactcaatttaagacaccagccgttacattgggtacggctaaagagcatccatggttgcctaagatgtatgaatcctttggatttaaagcttatgatcaagtacattttagaggaaaacaacatacaacggtattgtttaaaaaagacttgatataactaatacaagcaccttgtgaggatattcctcgtgaggtgtatttttttgtacaagatagtgcagaatttttacatttggatatataatatatacatgtatgtcatatctatgcgttcgttttgaatggtagatggtttattgaaaggatgtgagactatgttagtcttatctggtattttagtgatggtcatcggtctgatgctgcgctttaatgccttgttagttgtcgtagccgcaggttttgtaacgggccttgcaggtggtctcagtatcaacgatatcgttggtgccattggggaggctttcgttaaaaatcgttatatgtcattatttattttgattttacctgttattggtcttatggaacgtcatggcttacgtgaacgggcagaaattttgatcggcaagatcaacgctgctacggctggtcgtatctttatgatttacctatttgtgcgccaagtaactgtagcttttggtattaacatgtccggtatggttgccatggtacgtccgttgatcgcacctatgagtgaagctgcagtagctcaaggtcgcccagtatctcaacgtactcttgataaggtgcgtggtgtagctgcttctgcagataatacaggcaatttcttcggtcaaaacttattccttgctgctggtgggttattgcttatcaaaggtgttatggaacaattaggctattctgtagagttaacagatatggtgttatacggattgccaactgctgtttgtgcctatatcgttaacttcattcgctttattatcttcgataaaacaattcaagcctctgtagcgcgtgacgaagaggatatgaaagctggtaaattagtacctaatgaatttaatatccttgttacaccagaagaattaaagaaggaggctgaataatatgttagaacttatctataaaatgcagcccttagattatgtatatcttctcgtagggatcatcttatttatctttgccattcaatcatttttggataaagaacataaatatcgtattggtacaggcttattctggctcttgtacagcgtgtcctttatctttggttcttatctatcaaaggaaataaatggctggctcgttatcgccatggctgctatcgtcttggtaaaacaactcggcaaaggtcattactttgaatctcctattgaattcaaaaaagacgaagcagtccgtattggtaatgttattttcgtaccggctttacttgttggtatcatcacattcatcattggcttctttactaaattaggtgctcttgtaggcattggcattgcggccatcatcgcaatgtgcgctgctctttacatcactaagggttcatttaaccaaggtttccatgaaggtcgtcgtcttatcgatgctatcggttggactgctatcttgtcccaattattagcggctctaggctatctatttaatttggctggcgttggtaaaattatctccagtgctgtagctagtgtggtacctgcagataatgtattcctcgtagttgtagcatactgcatcggtatggtcatcttcacaatgatcatgggtaacgcttttgcagcctttgcgatgattacaagtgctatcggtgttccaatgctcgttgtagctcatggtgcaaacccagctgctattggtgctatcgcaatgcttgctggctattgcggtaccttgatgacacctatggctgccaactttaacattgtaccggtagcgcttcttgaaatgcgtgatcaatacggtgttattaaagctcaacttccaattgcattgattatgctcgtgttaaacatcctattgatgtactattttatttaagaccttgttctgtggatgaacaatcttttgaaatatccttatgaggtgttatgatgaaaactattttaattactggatttgatccatttggtggcgaacctattaatcctgcatgggaagctgtaaaaacgatggatggttatactgatggcgattacaaggtggtaactcaaatggtgccaactgtacgttatacttctgttgatactgtgaaagcagctgctgaaaaatgccaaccagactttattctatgtgtaggtcaagcagggggccgtccagatattacagtggaacgagttgctattaactgcgatgattttcgtattccagacaatgcaggtaatcaaccagaggatgagccaatcgtagctgatgggcctagtgcgtactttgctacattgcctattaaaaacatcgtcaatgcattgcatcaagcaagtattcctgcaaaagtttctaatacagccggtacctttgtatgcaatcatttgatgtatggtgtatgccattatgcggcacaaaagggcaatatcaaggctggttttatgcacattccgtacttgccatctcaagtggtggataaaccaaatcaacctagcatggctgttgaaactgtgcgtgccacattagaaacaatcgtgcatgtattggctcatggtgaaagctacaaggcacaagatattaactatacaacacctcatgaataggcggtatctttaatacgtgtatcgtatgttatatagtatgatgatgcggtgtagagcatatagattcatatattttgtttgtgtataaatgagagtgggttatctctatgaataaaaaattagtagcaagtttagtttcttgttttgtattgggttctgtcagtgcctatgcagccaatccatttagtgatgtagagccttctagttgggcctatcaatcagtagaacaattggcatctgccggtattattaatggttatccagatgggactttcaaaggcaataaagatattacacgctatgaaatggctcaaatggtagcgaaagccatggcgaatcaagaccgcgctaatgcagaacaacaagctatgatcaatcgcttggccgatgaatttagtaatgaactcaatacattgggcgtgcgtgtagcaaaattagaagatcaagtgggcaatgtaaaggtaaccggtaattaccgtttacgttatcgcggcagccaattgaaaaatgatgcgtatgcttatggaaagcattccgcctttgattatcgggcgcgtgtgatttttaatgctaaggtcaatgataaaaccgatgccgttgtccgtgtacaaggttccggtgagctcggcaatagcaatgctaatatagctcaggtaaatcttgcctatgtagatcatcattttggtaaagacacaacattgcgcgtaggtcgccaactctatacgcctgcactagggctcatgtatgatgacctcatcgatggggcgcgcctcatgtataaacatggtaagctagatgtatccgctagctatggttactggtggggtggtgcaggtacgtaccaaaataaggaaaacactatctctgcagctatgctagaagtgaaaggtaaacttaacaaacatattacccttggtggtatgtatggccgtttccataatggtaaattataccaaggtcaagacattgatgcggctacaggtaaacaagttaaatcctttatcgattccccgtacaaaaatatttggggccttaacgcgaacatgaactttaaccgttggaacgtattcggcgaatggcttactgcaccaggtgtatccaattcccaagcttggatggctagtgtaggttatggtaattacaatattagtaaagctcgtacttatagcgtacgtggtcaatattactatgaagaagctaactcgcctgtcttcagtagtgcctttgcaccggcctatagcttctacaatcaacactatgtggatactaagggcgttgctcatgtacgtaatggttttaaaggctttgtagctaatgtaaactacgtaccattccaaaatgtatccatcggtgcttactatggcttcggcaataaagacatggacggtaataaattaggtgattactggcgtacagacgtgaactttatgttctaatctcagaacgtcctatacatgtggtttcagtattagtacaggcctgtactaattctcagaaaggatatataggggtactacaaaatagaacaggcctgttctattttgtagtaggggttgttcaaaatgtaataagaggctgtcattgttgacagcctcttttgctattgttgagctatattgggatgaataaaattgatgtatttttcgtcgagtaaacgtatgaaataagcagatcgttgttggatataggattctaatatatctaattttgcatctgttagtatatctgatgggatacgattaaatttaaatcctaataatggtgttaacatggcacggtgtgaatcgtgaagatataattttgccaatgtatcaaaggagagtccccaaaaactgatatctttcacaccatttaaatcggtatattcatcgttagttatattgtagaataatgaatttccatgatcaaataaaggtgcaggacctaggatacgattgctttcattatcgatgagaataccaaaattgttgaggtgtcggtcagtattatgaatgagtgcatcgaataccatcatatcagaaaatgggataataccgtacaagctagctatatcgtgctgtgtgtcatataacataagttcgtcacgagatatcgtttcttttaggagaccagatataggcatgtatccgacctgttccgatgtgaatagagggcacgcactaactagttggttgtggaatgtagtgagtttatattccacatgcgctaagcccatagctgctgcaatttgactagcatatacttcactgagtgcttcaagccctccattggcatagcgaggtgttgaacctttgtataaatagatgacaccattttcacgatgccaacacttacggagcatgccgtttgttgtgtattctggggtcgtcacaatcccttgtatatgattatcttcgcctgtgaaagcgatgcctgccacaatttcgctaaatggattgtcgtataaattaacatctgaccatgaaatagtggaatgagtcggttttacccaatatgtatcatttagggatagaccataggttacatctaaatatcgatatggattttctgtatctgaaatggcatctaataaattctcaacaaatgcacgattatttggaatcttacgttgtaataaccaattttttagtccttttatggtaggttgcatatttattggcaatgtcgcattatctatgattgttaaatcagaaatatccatgcgaaccaatgtggttaagttgacaacatcttcgtgcctctcgatgcaaaactgcaagagaggggtatccttgttgagtaatacatactccatgtgaatcctcctttcctttgagttttatatatgctcattatagcataagaaaaaacctttctatggatgtagttacaactcagattatctgagtttattagcttttagattggatgctataataaataatataaagttgtttacggagagtaatgataatgtatgaaattgtaaatgaatctaatttaacaatagcatttgatatggatacacaactatctccttttggagcctttggtatttatattaaacaagggaatcattgttgctcagctatcattgataccggtgattggtgggggatacatagaggttataatgagcttgtcgacatgaatcaaacttgtaaaggaaaagcgagttttcgccattatctgagtagcggtggcaataaacttatatttacattagattccaaaggtggtcttaatatcaatattgttatatgtgagtataattacgagtgtaagatgactattgaaagcttagaccaaacgtatttacccaagtttattgagtttttcaaagtttttcttgaacgcgaacctaaagaaatttagtttatattgcataaatctaaaaaattattgaagtaggcatataatagctatatattttataaattagtacacgcctgtaccaatttcaaagtagcttatatatgtagtttcagaattagaacaggcctgtactaattctcataaagggtatataggggtactaaaaaaatagaacaggcctgtactaattctcataaagggtatatagggtactaaaaaaatagaacaggcctgtactaattctcggaaagggtatataggggtactaaaaaaatagaacaggcctgtactaattcacagaaaggatatatagggttcctacaaaatagaacaggcctgttctattttgtagaaggggatgtattcgagcccctatctcctaatgttctataatttagcaattaaaaaagagtcgctccaaacggtgcgactctttttctgtacccagtttctatatacaattattttgtaacaactttaagatctacaggaattttagcttctacagcttcgcctttgataactttttgagctgtatcaatagcgattttacccatttggtctggttgttgagcaattgttgcagccaatgtgccgtctttaacagctttgtctgcatcagcagtaccgtcaaagcctacgatgaagattgttttgcctgcggatttagctgcttggatagcgcccaatgccatttcgtcgttatgagcgaagatagcttgtacgtctgggttagcttgcaagatatttgttgctacgttcaaaccttttgtgcggtcgaagtcagcactttgttttgctactactgttaagtctttgtcagctacgttgtggaaaccttggccacgttcacgagttgcggaagcaccagggataccttcgatttccgctacttttgcagctttgcctactttatcaacgattagttgagctgccatttcgccgccttttacgttatcggaagcgatgtgagctactactttgcctttatcagcagaacggtcaacagtgattacaggaatgtttttagcgtttgctgcttctacggaagtagagatagctgcagagtctacagggttgatgatcaatacggaaacgccgctttcaattaagtcagaaatatcatttgcttgttttgcaggatcgttttgagcatcaacgattttaactttaagaccaagcgctttagcttgagcctcaacgccttctttcatagatacgaagaatgggttgttcaatgtggaaacagagaagccaatagtgccggattttttgtcgccgccgttatcagcgcttttaccacagcctgctacaagaccgataaccataacggccatcgccaacagtaacaatagttttttcataggaacctcctaggctttcttacggtctgcaagaacagccagtaaaataacaataccttttacaacttgttgatagaaactggaaacgtcgagaatatttaacccattattgagggtaccgataattagggcaccaattaatgtgccaacgatatgaccacgaccaccagcaaggcttgtaccgccaagaactaccgctgcgatagcgtcaagttcgtagcctgcacctgctgtaggttgtgcagagttaagacgagaagtgatgattgcaccagcgataccacagagcataccagtcaaggcatacacaaagattttaacgcggtcaatcttgataccagcaatgtaactaaccttttcgctaccacctacggcgtatgttttacggcctaaggatgtgcggctcaatacgaaccaaaggatgatgaaagctaggaacattgtgatagctggaactggaaggcctgcaatatccccttggccaaagccatggaatagaggatcttgtgtaagaccggagattgggttaccgtctgtgaatactagcgtcgcaccacggtagattgtcatggtcgccaaggtagcgataaatggagctacgcggccataagtaataacgagaccgttaataccgcccaatacaagacctgcaccggcagctagcacgatagccaatacagggtcagtaccagttacgatgaggttagccatcactgcactagagagggcaaggatggaaccaacggataagtcgataccgcccgttaagatgacgaaggtcataccaaaggcgatgattgcattgatggatacttggcgtaacaagttacgcaagttagagaattcaaggaaactgtcgttcatgacagagataattacaaataataggatgaggccgatgagggggcctaatttttttacatattgtagagctttgctgtccattattgtcctcctgtggctaatgtcataatcgattctggtgttgcatcgcagcggtccaagatacctgctacgcgaccttcatgaatgaccataacgcggtcgctcatgcctagcacttcaggtaactcagaggacaccatgataatggacacaccatcgttcgttaattcgttcattaaatcataaatatcacgttttgcgccgatatcgataccgcgcgttggctcgtccatgatgataatggatggctttttaccaacccatttcgcgataaccaccttttgttggttaccaccagatagggacgatgccggttcgtgaatagattgtgttttaacgcctaactttttagacaattcgtcagcaaaggaattgagcttgcctttatccagtacatgagatggacaaatgtcgccaaggttcggcaatgtaatattggaaccgatggagaaatcgaggatcaagccttcgctctttctattttctgtgatgaaagcaatgccagctttgatggcatcttcaggttttttacagttgagaacggagccgttaactgttacggtaccgccattgtgtttatctacaccaaagatggcgcgcatgatttctgtacggccagcgcccatgagacctgctacgccgaggatttcgcctttacgcaaggagaaggagatttcgttgtcgaaaccttctggtttgaggttatcaacactcatgactatttcgcctggtgtagttgtacgagcagggtagaactcatcgatagaacgacctaccatgtggcgtaccacttcgtctacagaaatctcagcagttggttttgtaatgatggtgtgaccatcacgcataaccgtaatggtatcgcattcgctaaatacctcttccatacggtgagagatatatacgatagccacgccgcgtgctttcattttgcgcatcatgttgaacaatgtcgccgtttcacgctctgtaagggccgctgttggttcgtccatgatgacaacctttgcatccaacatcaagatgcggaggatttccgtcatttgttggtgaccgacggagcaaagacctgcttccgttgtgagcggcaattcgatgcctagttcacggcacgtattttctgcctcttcgagcatcgcttttttatcgagcataccgaatttattgcgcttcggtctcattaaatatagattttctaacaatgttagatttggccaaatgttgagctcttgatggatgaaagccacaccgtttagctcggcctctctcgggttcgggaaggtgcgctctacgccgtcgatggtgattttaccagcgtctgccttgtgaatacctgtgaggatattcataagggtggacttgccggcgccgttttctcccatcaaggcgtgaacctcgccctccttgagggtaatacttacatcgcgcagtacttggttcgtaccaaatgcctttgcaatgcctgacataacaatttccataattactcctatatgattggtgaaagtatcgattacttatgtattatattttgtatgccatattatcttacggacggtcgctaaagatgcaatcggcacgcaagatgatatttgcatatggagatgcttcaccagttcgaatgatgcacttgcattgttttgatgcttctttgaaagcatcgtgactagttgtaatccattcgaaatcagcgcaagggaatgtggattccaagaaggcatgaccctttggattaaaatccttcatttccttagcgatatgaattgcttcaatcttcatatgctttgtaatgagagatacaacctgctcaaaacttggtacaccgaactctaaagcaaggtcaatcttttgaacaccttcgggtacgggtagaccacaatcagaaatacaaatcgtatctgtatgaccaagatctgtaagaaccttggcaatatgactgtttaaaataccatatcgttgcatataaattcctttcatttcaatgaatgaggctgctaaagcctcgttcattgttccttttattatatagaggtcgaaagtattcgttattaggtaaatgtttgttggagctgactaggactttcaaagcgactttggccctgcgaaggccgtaggccgtagtcagacccggccggtggagcttttaaagtcctagtcagctccctactatttatctgataagaatgcgtcgacctcatccttcgtaggcattcccgactgggcacctagtttttggatggaaagggccgcagctgcattgccgtagtgcaatgcgtcggctaagcttttaccattaacgatagctgttgcgaaggcaccgttgaaagtatcgcctgcacctgttgtatctactggtttaaccttgaagccggatacggtgtggatttcgccgttgtcagcatagcctacacctttactgccaagagtaacgataatcttgttttcattagctaataatgtttcctctgtagttttgttagggtagagtgccgataattcgtgctcgtttggtgtaatataggttgctagttccaaccattcaggattgagatcagctgccggagccggatttaagaggactttcacattagcctcgtgacaacgacgaacgatgtattcaatagttggaataggaatctcattttgcaccattacgagatctgcttgctcgatagcaggccaagcattatcgactacagactggtctaccttagcattagcaccagcgatgacaataatgctattgtcgccttcagctaacgtgatatgagcagtacctgttgtcgtatctgggacagtgacgatatagtccgtattgatatgattttctttgaggttatccaaaatcatttgtccatatgcatcttgaccgatgcagcctaccatggtaacctctgcgcctaggcgagcggcagcaaccgcttggtttgcacctttgccaccgtgagcgatgtgcaattcgttgcccataattgtttcgcctgctgcgggacgtttatccgcgaggaccacaatatccatgttgcaactacctataacaacaatgcgattcatgatatctccttacctgtttattagtgtatcttaattctgttattagtatagcgtaaataacgttgtttatctacataaataaccataaattatgggaataaaaaatcggtatacattttcttaagtaagaaatgtataccgaatgaattttatagttttataaaccgttaaggatattaatatcagattagtccaattgatgcatcattttatcaatacgattaaaagtttcttctatggttgttgtacgtccttgaatgatgtcattttgtccttcaaccagagatgataatatctctagttgggcttttaacatattatatgttttgtattctagagtgattctatcatttgaaagttccatagaggtctcctaatatatggtgattataaaaacgatggtttatcgtagtgtgtaccaggttcacctacaccaatgctggcacggctgaatggtgtttcgtcttcaacgtgtaggatatcgtaaacagctttaaccacagcttctcgtgtaacttgtgcatcattgaaaggagcaccttcagggattaattcataattcgtattttccatgtcattataaagccaaggtagacgtaaaatcgtgtagtttaagttggattcgcgtaatacgttgcgcgcctgacgctcgccttgtacatagctaattggtagactatcgaaggtaaatttttctaaagccgttggaaattcaccagataggccagccatggataagccgatgatacgacgaatgttttggcgagcaagtgctttcacaatagctgccatatcactgcctgtttccatagcactgaggaatacgacttctgtattcttaacggcttcctctaattttttagggttttggaacgatccttcgataacggttatccgttcgtgttctaaaatttccggatgaatgcgtgtgctcaattgacgtccatataaagtaatgtgcatatctgtatatgttaataacgtcgccgttaagcgttgtgcaatttggcctgcagcgcctaagattgtaatatatttgtacatgtagacctcctatgtcctaggcataagtatttatatgcattatatcacaactatatgacgagaaagtgagaataacaatttaattaatagctagaatttcttttgttgttcttagttgcgcaaatcgatttctccaaattttttctttgtaaaaggataagatttgatcggcagatagatggatgttgtcaaaggttgaaatcgcatcttcgacgatggtgattttataaccatattcaaagcctactttcacagatgtatcaatgcaaaattccacttgcattcctacaaatgttaaatcggtaatattttttcggtttaaatattcctttaattcagtgtccttgaagatgctattgtaatatttattgaaaatcttttcgttttcttgaggctttaattcgtgatagacttgccaattatcgctacctgttgctaataaaccttcagcttcagagtgtctgataaaaatgacttctatattttgatctctgaaatgttgaatgattgcttttgtatttatgataaaattttttgtattgaaaggattttctttaactaagccttcttgtatgtcgattacgattaatgcttgtgccatgatggatttcctttattaaagataaattatatgtattacatggatgtaattagaatttattatattagttattaaattattgtcgatttcttcgtatataagtatctatgcgcattatatcacaagtatataacaagaaaaggaagaaagcagtatcatatatgttgatagtaatttgggaaaagctgtaaaatttgatgttgaatttacatgataatttaactacaataataataagatatttgaaaaatgagtgttatattactaaagtttttttgaggtgatggtatgccgaatataaaaccgatttcagatttacgtaattattctgaagtattgcgtgatgttgctatagatagtcctgtattcttaactaaaaatggtagaggccgatatgcaattatggatattcaagattatgaacgtgtaatggctacgataaaacttatgggcgctttagagacaggtcgcaaatctggtgaagaacaagggtggatttcatcagagcaactaaagagtgaattggggatttaactatggatcatcaaattagttatgcaccaaaagcacgagaagatttgcttaaaataaaatcctttatagaagaagaaaccggggatattgagttagctaagaaaactatttcggatatagtgactacgaatgattctttaagagcttttccagaaatgggacagcgattattgataaacatgggaagtaaaattgaatatagatatttgctttgtcataattatttaagtttttaccgttatttagatcggactatttatattgatagaatattaaatagtagacgtgattatcttaaaatactattggatgaagtacattagtttttaaaggcaccatcattaatagatggtgctataaaatgattttaatagtaacatgaagatgcgtgaacactctttataatttgaatgcattgtgatttaatgatataaaagtaagattttatttaatcttaatctgtaattgaaagagagaaggcattcattacaaatttatttggagggaactaacatgaaatttctagatcaattgggagatgcggtaaaggacgtaaaagaattagctaaatccaaggctagtgttgtgaaagatttaactgctgacgcagcgcaagaagtaaaggtattggctaaagaaaaagcaaaagatgtgaaggctaaatctgctgatgcggcgcaagaagtaaaggtattagttaaagaaaagacggcagatgttaaagctaaatctgctgatgcagcacatgatgtaaatgaattggtgaaagcaaagtctgcagatgtggcaaaagatttagaagctacccttaaggtaaaggctgaagagctaaaacaaaaggctagagaagtaaaagatataactgctgatgcagctaaagatattaccgaaactgttaaagaaaaatctgtaggagcagcaaaagaaattagagagaaggttgctgaaacaactagcgaagataaaacttcaggaaaataaaaatgagaatgacttaatatttcttagttgggtattaagccattcttattctatttttaacaccaagagaacaggtagatctagattttagctatttaattgatttagcatgtattgataatagattaagacgaatcaggctatacttgatttgggtattaagaaatcttcctaggaggacagcatggatttaaaagaagtaaaattactttcaaaagaaataagaaataaatattttgaactagaaaaagagatacatggttctgtttggtcggtagaagaagatgcgttggcattcttaactgatgcgggcttagtgggtcgattgactatggataatcaaggtcgttggcctagtgcagacaaagaattgttaccatctaaaatcggcgaatgtgtatggtggttagcaatccttgcggaacgcatggatctaagctttgaggaatgtgtagaaacgtttctcactgaaagattaaaagatctgaagtgagtttatacaagttgagatattacttttaaccgtcatgcgtgcaaaagtcctcgaagagtgataaaatatagattatatattcatttttagaaaagaggctattatggaacggataaaggatctcgtgtacacccatgaccagggtggacagtttagatgggtaacggtgagcaccttaatgcttgcgttaggtacaattttgcacttggtgagtcctagttttgcagggattacgccaaactggatgatttcagcgtactgtgtagcgatcttgttgacgaaacctagtgtatctcaagcattgggcattggtttagtggcggccttgattgaggtgttgacatcaaaatctggtttcccatatggtaacttgttatccgaaccagctggtgcattggtgataacatttatttctcgtaccatgacatctatgaaaatcggtaaaattggttcctttgaaatcacgccgattgtaggttcattctttacgactgttgtatctggtggtatttttgttacgttgttatggcaaattgcaaacttgcctaataatgtatatctttatgctatgtggcctcttgtgttagtggtagcggctgtaaatgcagcgattacaccagtgttgtacattccggctcaaaagatgttcgctaagcgaggcatgttgcctaccggtagcgaagcttctagcgaccatagtggtctcgttattacgccagaacgggatgcaaagatttccattgagcatttgaactattaccatcctaaggcgactgtgcctacgttaaagaacatcaatctcgatgtgcatgatggtgatttcctcgttgtaacaggtcctgccggttgtggtaaaagtacgctttgtatggccatggttggggcggtgccaaaattctatggcggtcgtctagaaggtatggtattcgtagatggtaaggctacaacgcaattatcgattcctgagttagcaaatcatgttggcgttgttcttgccgattatgatacacaactcgtaacgatgacggttcgcgaagaagtagcctttgccatggaaaaccgtggttacgatcgagcaaccatcgatgctcgttgtgcagaggtgtttaaacaagttggtattgaaggccttgaagaccgtaaaattacgagcttgtccggcggtcaacgtcaacggttagcgattgcttccgtgctggcaaccaatccatctgtcctcgttctcgatgaaccaactagttcacttgacccagatgggacagccgaactatatcgcctcgttggtgatttgaaccgcaatcatggtatcactgttgtagttatcgaccatgatttgcatgccgtattgccatatgctaatcgcatggcacttatggtggacggtgaaatcgtatgtgatagcgatgtggctacaacattggaatacatgtacaatcataatatttatgtagaagcattgccatccgtatttacaacgtatatggaattggaaaaggccggttatcatagcgatgaaccttggcttagcatcgaatcagctattaagggccttcatcacattgaaatggccaaggccatcgatcgttctcgttatgaacatacaagtgatgctgatgaaagccaagttcaacatagtaatcatgtaggtgaaagtacaggaggtggtgcacatgcttaaggtagaaaacttacgatttggctatgtgcctaccgtagatatttttagaaatgtaaactttaccattcatgaaggcgaatttattgccgttggtggtaaaaatggttgtggtaaaacgacgattacccgtctcttagtaggcctcgaaaaggctgctgaaggccacatccgttataacggcaaggatattacatctatgccaccatctaaacgcggccaatttattgggtatgtattccaacaaccagatcgccaaatgtttagacctactgtggctacagaggtggcgtttggtcctgaatccttaggtcgttctaaagatgaggttacacacattgtagacgaagtattagaacgctgcggtattagtcatttgcgcaatgagtatccacctacattgcgccgtggcgaaaaacaacgtgttgccattgcatctgcattggctatgcagtctaacattcttatcctcgatgaacctacaagtggtcaagatgggaaggaaacaaaagaattgttagccttgctccgtcagttgaatagtgaaggcattacgattttattgattactcatgacatggaaatcatggcttctgaatgttctcgtgccatcatcatgggccatcgcaccgtatcctttgacggtacaccagaagaattattttcgaaatctaccgatgaattacatgatcttggcctcacaaaaccaccaagtgtagagctttcacaagcggtaccaggactaggctactgcaaatcgatggatgaattacggacgcgccttatcgcgcaactggcagaataggaggggaccatggaacgattagtaccattaacaaaaattttgatgaccctcgccgtatccgtatgggccattttcttaagagactggatgtcattgatggcattagttgttgtagaattagtagcgctcttgttgaccggtttattatggaaacaatacaaggccgtatttgctttaatcgtattcgccatattcttaggcgttgttcaatacttaggtagcggagacgttgtatctgctgttgtatccggccttcgcatgttagccatgacgcttgtatttattgcactcttggcaacgacgaagttacaagatttaacagcggccctcgtaacacaatgtaaaattccttatgaatatgcatttatgtttactgcagctcttcgctttgtacctgattttattggtgaaagcaaggctgtacaagaggcgcaatcctgccgaggtctttccttagaaggcaatatctttaaacgcatgaaatcctatggttctgttatccaaccattgctgctaaaatccttgagccgttctgaaacaatggcattatccttggaacttagaggctttggtggcaagacacatagctttgcaacgtctgtaggccttaaattattagactatatagttattgttgccttagtagtagttacgcttattttgtttggcgtattatagagatgtaattgactatcttctattactagtcagtgttatatatttatgatatactacaaataggtagtaaagcgtacaaaattacctacaatataacaaaaaaggacgagttgcagctcgtcctttttcttgcttatttttttgtcttattgttgagccaattgttataggtagttacaactaaggttatttttataaactgttttagaggaatatatgagtgaattaataattcgatcaattgcaaaagatgatgtgtttgcttgtttaactatttacaactacgaggtcgaacacggcgtagctaccttagaccttgaaccacgcacattagaagagtggtatgaatggtataatgctcacagcgatgagcatcatcccatcattgtaggaaccattgatgatgtagtggtaggttatgcatcgctttcaccatatcgattaaaggatgctttcaaaagtactgtagaattatctatttatattcatcaagattaccgtggccaaggtgtggcaacgcggctgatggaacgtattttggagatggctaaagaagatacgatgattcataatatagtatctgttattacagcaggcaatgaagaaagcacaaaattacacaatcgattcggctttacctattgtgggcttacccctgaagttggttttaaacatggtaaatatcaggataccgaaacttacgcattattggtataataatagatattaaatcattcatatattcgtggggttgcggattatatgttacgcatagacaggggttaagtaagttatgataaatatgaaagcagaacggcaattcataggcaatagtacgtatcgtagccgattggtagatggtcattttcatactgaattatgtccacatggtagcggtgatagaacggcattgatgattgaacaagccattgaattgcgcatcgaaaaggtgtgtttaacagagcatgctccgttaccaaaggcctttgaggttgagtatggcggtgataagattgcctatgatacggcgtctcttaaactcaatcaagtggattcttatcttgaattgggacgtgagttacaacgtgcctatggtacgcatatcgatatttctcttggctttgaggtggattatattcctggttttgaaagcgacattcaagactttcttgatcgctatggtccattgacggacgataatattctatctgttcactttatggatggcgtaggtggcaaatactactgtgttgactataatacagaggaatttgaaaagggctttggtccttggatttctaatcaaagtgaattgtactataaatactttagtatcattcgccaagcggtgcgtgctgatttgggtgcctatacgccaaaacgaatcggtcattttgatttaattaagaaataccaacaccatttcggttttgaacaccatttagataaacgaaatgctcaattagtaagcgatatattacatattatgcgcgttcaaggtagagaactagactataatatgagtggattctttaaacctgattgcggtgaaatgtatccaagtcgttttattcaagggatagctgccattattggtgtaccctttgtgctaggatctgatgcgcatagtgtagcagatgtagcaaaggtttgggactagatatattatttgattatgatataataaagacaagaagagccaattaacgttgtggaatgcgttaggctcatctccaaaaaatagaaaaatgagaaatggcctaatgtcccttacggggtgttaggtcattctttttagtaatttatacttcagtataagtagtaaaatatgaatattttattgacttttttttctataagtattattataatttcatgctttagcgtgataaagtgataaaatctaaaagaatctatatattttaaatagaaatattagcatggtttatagaaaggatgatcctcatggtacagaaacagttgcctacaggttttcgtgatgatataggggctgtagcggagcgcaaggatgatgtgagtcagtatttgcttagcctttgccgcaatcgtcagtatacaaaaatttctacaccccttgtagaatacaaagatgtgtttaatggttatacattaggccgttgtcaacatatgtacgaattctttggtagttctgatgcatctgtggttatccgtcccgatttaaccatgccaatcggtcgttttttggcgactacgaatattgaattgcctcgcaagttctactatcttggcgatgtgttgatgaaaaacaaacagcatcgcggcgatattaaccaagttacacaaggtggtatcgaaatggtcggctatgaaggtattgatgccgagctagaatgctttgccatcattaaagaggtgaatgaatcacagctcaataataccttattattagaaattggtgatgctcgtttctcccgtgctatcactgatgcattgggcttgaccgatggggaacgggcagatttgctcgatgcgttatttacaaaatatttgccacgctataacgaattgattagcgaatttaaaaataatgcattgtatccattccttatgatttggcctcgcttattcggcactgtaaatgatattaaaaatgagctcagtcaagtcatcttgcctgcaggggcacaacgtattttagatagccttatggatctagcgggacaaattgaagcgactggccaacaagttcgcattgatgtgtctacagaaccacttcaatcctattacacaggccttacctttagaggttatgtagatggcgtatctcaatacatcgtcagcggtggtcgctatgatggtctcttatctggatttgatggcacaccgatgccatccgttggtatggctttcaacatcgatgtccttacagatgtgcttatgcaaggtgaaagcaacattcaagataatggtaaattgcgaatcgccttgacaaaggggcgcgttgaaaaggatttcattccactcttagagtcctgtggtattgactgcgaaccattacgcaacaaagcgcgcaagttgattatcccattgggagattcggtagaggttatcttagcgaagggccctgatgtaacgacatatttgaataatggtgtcgttgatttaggcatcgttggtagtgatgtactggatgaacaagacaatacatcttatgaaatgctagatttgaaaacgggccaatgccaatttatattggcctccttagaagggtataatccgaaggaaggccgtcgtcaacggattggtacaaaatatccaaccattacaaaacaatatttcggatcccaagacgtagaaatcattaaaatcgaaggttccgttgaattggcgcccctcgtaggtctggccgatgccattgtagatattacggaaacgggtacaacgctacgagaaaataatcttaaaatctatgattggctccaaccaatatcaacgcggttagtggcaaatccattggcattaaaacagaaaagaaataccatctttgcgttgattgaccaattacaatcggctatcgataagaaataaatgtactgtatcgataagaaatacatatactatatcgagaaagaaatagtaatatactctatcgtgatatgatgagaaacgtttacaatagaagtatagacatacatagtttgaaatgaggatatacaatgaaaatttacaaagaatctcttgatgcaatgcttagcattgtccgacaatatacacaacaaacaacagatatggaaattgaacgccgcgtgtacgatattatcgaaaacgtgcgtgctaatggcgatgcagcactccgtgaatattctgaaaaattcgatggcgtaaagcttgatgatttcaaggtggatcaatctatcatcgatgcggcatgggacaatttaccagaagacttgaaacacgctttattggtagcgaagaaaaatataactgaattccatagccgtgaaattgaacaaggctttgtcgatatggatacaccaggcattacacgtggtcaaaaggtaacgccattggctcgtgttggtctctatgttccaggtggcacagcggcatatccatctaccattatgatgactgcattgcctgcaaaaatcgctggtgttaaggaaattatcatggtaacacctcctcaaaaggatggcattaatcccgctgtgctaggcgctgcaaaacttgctggtgttgatgcggtataccaagtgggtggtgctcaaggtgttgcggctcttgcgtatggtactgaacaaattccaaaggtagataaaatcgtaggccctggtaacatttatgtggccactgccaagcgccaagtatttggtcaagttgatatcgacatgattgcaggtcctagtgaaatcggtgtcatcgctgatgaaagtgctaatccagtacatcttgctgcggacttattgtctcaagcagaacatgatccacgagctcgtgccatcatggttaccaatagtgaaaaactagctaacctcgtatctgatgaggtagaacgccaactttcacaattacctcgtgaaagcattgctcgtccagctatcgaaaacaatagctatattgctgttatggatagcgtagaagatatgtttaccgtgatgaacgaagtagcgccagaacatttggaaattcaattaccggaccctatggaatatatgagtatggtagaaaatgcgggctccgtattccttggcagatatgcctctgagccattgggcgactatgtaggcggtacaaatcacgtattacctacgagtggtactgcaaaattctcgtccccacttggtgtgtacgatttcgtaaaacgcatttcctttactcaatttagccgtgaacgcttacaagaggtggcaaaggatattactactttggctcgtacagaaggtcttgaagcacatgctcgtgctattgaagtgcgctttgaaaaataattgtatggatgggaacgccttaaagggcttccttaatgataagaggatactatgatgagaaccaatcggtcagctacggtaactcgtaaaacgggcgaaacagatattacaattacacttaccctagatggaaatcaagagattcaggttgatacaggcatcggtttccttgatcatatgctccatttgttggcaaagcatggccgttttggtcttgctgtaaaagccgtaggcgatacgtacgtggatgcgcatcatacggtagaggatattgcattgaccttagggcaagcattgacacaggcccttggtgacaaggcgggtatcgagcgttatggcgatgcgtgggtgcctatggatgaagcgttgacacaggttgttatcgatcttagcggtcgtccatacctcgtgtttaatggtgagtttacgactcctgtattggggggtaattttgaaacagaattggtagaggatttcttccaagccttggctgtgagtggtgctatgaatttacatgtgcgcaacgaatatggtcgcaatacgcatcatattattgaaagcatgtttaaggctacgggccgtgcattgcgtaaggcggttaccattaacccagacattcaaggtgtgaattctacaaagggtatgatttaataaagcccttataaatggtgaaagcagggccacataaggctcgtgaatagaggagatactatgatttttccagctatagatttacaagatggtcgcagtgtacgcctatataagggtgattttgcaaaggaaaccatcatcaatccaaatccggttgaccaagcatctcagtacgaggctgctggcgttggcgctttgcacctcgtcgacttagatggcgcaaaggcggggaaaccagttaatgtggatatcgttaaacgcgtgcgcgctgcatttacaggtgtgttagaaatcggtggcggtattcgtgataaagatgcggtagacttatatttagaaatgggcgtcaatcgcgttattctcggttccgtagcccttaaaaatcctgaattgacgaaacaggttatcgccgaatacggaccagaacgcatcgttatcggcgtagacggtaagaatggtaaggttgctgcagaaggttggctcgaccaatctgatgtgcctatgaccgaccttatcggtgctatggtggcagccggtgcgaagtattttatcgttaccgatgtggatcgagatggtaccatgcaaggggctaatgaagcattgcttggttctttgcaagaccaatttccaactgctcgcatcgttgcctcaggtggtgtccgccatttagaggatattaagaatcttgaaaaacgcggtgttgtagacagcattgtaggtaaggccctatatgaaggcactattacattagaagaaattgctgcgtttaataaggagaatgcatcatgttagcaaaacggattattccttgtttagacgtagataatggtcgcgtaaaaaaaggtgttaactttgtaaacctcgttgatgtaggtagtcccgtcgatattgcagctacctatgaggaacaaggcgccgatgagcttgtatttctcgatattacggctacagtagaccgacgtacgacgatgcgcgatgtggttacagatatttcaaaacatgtgttcatgcccctcaccgtaggtggtggtattaaaacagtggacgatatgagcgcattgctgaaagctggcgccgataaggtatcgctgaattcagcggctttagcgcgcccagaactcatcagtgaaggcgctcaaaagtttggtaatcaatgtatggtggtagctattgatgtaaaaactgattcaaagactggtaaatggtatgtgtatacccatggcggtcgtaagcgtagcgattgggaagccctagcgtgggctaaagaagcggtgagacgtggcgctggtgagttattggtgacaagcatggataaggatggcaccaaatctggctttgacatcaaattatacaaggccttggaagaggtcgtagatgtaccgattatcgcctccggtggagctggtacggtacagcattttatcgatgtttttaccgaaaccggcgttacgggtgcattagcagcatctatattccattttggtgaaatcagcattcccgatttgaaatcacaattgaaagcagcgggcattgctgttagatagggtaggagattgtagcatacatgaaaccagactttaataaaggtggcggcctgttaccgacggtcgttcaagataatacaacaaaagcagtgctcatggtggcgtggatgaacgaagaaagctttcacaaaacactagaaaccaaggaaacttggttttggtctcgctcgcgccaagaactatggcataagggtggtacaagtggcaatgtacaacatgtggtggatatgaagctcgattgcgatggcgatacattactggttctcgtcaatgcagaaggtcctgcatgtcatacaggagcggtgagctgctttttttacgatgtagaagcgtagaaatatacaaaatatgaggtgagatgacgcataggcgttagctttcacaaaggagaagaacaatggccaatcaacaaacattagaagaattatacgccattatcaaagggcgcaaggaaactccaaaggaaggatcctatacgaattacttgttcgacaagggactcgataaaatcttgaagaaggtgggcgaagaagcaacagaagttgtcatcgctgctaagaacgaagacccacaagaactagtctatgaaacagcagacgtactctatcatttgctcgtgctattagtagaaaagggcgttccttacgaagccatcttagaagagttggcaagccgtgaaggcgtcatcagcaaaacacaggaacgcaaagcgattacagatttgtaaggagtagagtatgaagaagattattggccaattaaagccgtatgtgccagaagaaccggcggagtccgtcaaagctcgcctcggtgtggagcgccttgtgcgattgtcagccaatgaaaatccttatggtacatcgccaaaggtacgcgaagcagtactagattatgtgacgaacaatgatgccaatctataccctgatggcaatgcatcatccttgcgaagcgtcctagcggattattggaaggtagcggaaaatcaacttgttattggcgtcggtcttgatgaagtgatttccatggtaaataaaacatttatcaatgctggggattctatcgttatcagcgttcctgccttttctgaatatggccttaacggtcttgtagaaggggcggtcattcgcgaggtgccatgcatcgagtctacaggtcaatacgattttaaggcgatgcgccaagctgtagacactacgacgcgcctcgtatggatttgtaatcctaacaacccaacaggaacctatgaatctgttgaagatatccgtaactttattagtacattgccgaaagatgttttagttatcatcgatgaggcgtatatcgatttcgtaaccttcgtagaggtgccaacagcacgagcattgctggatgaattccctaatgtgtttatcatgcgtacattctcaaaggcctatggccttgcgaactaccgtgttggctatatgatgagtagtgttgaattagctaattatattcaaaccattcgcttgccatataatttgaataccttgtcccaagtggctgctgaggctgcctttggcgatcgtgaattcttgcgcagtactgtagagaagaatgctgcagaacgcgtcttatgggaacaaacgttagatgaagtgggcggcacttattataagagcggagctaattttatctttatgtccgtacctaatgcagatggccttgctgatgaatggctcgctaagggctatcaagtgcgccgtgggcaacgggataattggttgcgtgtaactttgcctcctgctagtgatggtgctattatgcgcgctattttgaaagagtatatggcccgtcaataatgtaggccacttatatagcgatgtacattgcgacgtatattgctatttatataggcgtaaaagaaaggatgtcactatgattgccataattgattatgatgcgggcaatacatttaatgtacaaaaagcattacaacatatcggtcttgatgcggtattgaccgctgatcgagataccatattggctgctgatggtgtgattctaccgggtgtcggcgcctatgcatcggctgtttccgtccttcgtgagcgcggtcttatcgatgttattcatgaggtggtggagcgcaacatacccttgcttggtatttgtttagggatgcagcttttgtttgatgaatctgaagagtatggaccgactcccggattaggtattataccgggcactgtgaaagccattcctaataacctcggccttcgtgtacctcatatggggtggaatcaaaatacactatgtcgtaaagacagtgctttttctgatgtatctgataaatatacatattttgtgcactcttattacgtggataccgattctcaatatattacaacaactgcagactatgggattaaggtaccgggcattgttgagaaggggaatgtctatggcatgcagtttcatcctgagaaaagcggagctgtagggcttaatctgctacgaacctttggaaatatcatagtaaaaaaataaaatagtcttcgatatatgcttttaacgaataatgagtatctagaatgagaaagtgtaaattgacatatttttgtttagatatacaatgagtatgtaagtactcatcaatttataagctaaagtggcattggagacctaattttattagaaatgtttattcggcacctccgatgtcacgtacattggaggtgtttttatggttatgaatggtatttacttagttatagcctccgcgtgtattctaattttagcgtaccgcttttatggggctttcatagcggccaaggtgctgacacttgatcagtatcgtccaacgccggctatggtccacaatgatggtcacgattacgtgccaacaaacaaatgggtaacatttggtcatcactttgcagcgattgctggtgcaggtcctcttgtaggtcctgttatcgcagctcaattcgggtatttgcctggtgcattatggattctaattggttccgtactcgctggtgccgtacatgacatggttatcttgttcgcatccgttcgctatgatggtaaatctattgcggatattgcacgtgaagaaatcagtaagttcgctggcttcggtgctatgcttgctacattgttcctattgatcatcacccttgctggtatggccgtagtagtagctaactcattgcataactccccatggggtttcttctccgtatttgctacgattccaattgctattttcattggtatttatttgaaatggttgcgtcctggtaaaattcaagaagccactattatcggtgtagcgttgatcttcgcagctatcatctacggtccaaacgtagcggctagcgaatatgcttcttggtttacatatgacttgcaaaccatcgaaatcatgcttgcagtctatggcttctttgcagcagcattgccagtatggttattgcttgctcctcgtgactacttgtccacataccttaaaatcggtacaatcggcgcattggctcttggtattatcatcgtaatgcctgaaattcaaatgccagctgttaccccttacatctggggcggcggtcctgtattgaaaggttctgtattcccttacatcttcattactatcgcatgtggtgcgttatctggtttccatacagtaattgctacaggtacaacacctaaaatgcttactaatgaaagagaaatcttacctatcggttatggtgcgatgttaacagaaggcttcatcgctatgatggcgttgattgcagccactgcattacatccagacgattactttgctattaactccacagtagaatcctttaaagcgctcggccttcaagttcatgaattaccagcattgtctgcaatggttggtgaagacttgatgcaccgtcctggtggcgctgtatcccttgcagtaggtatggctcatatcttctccaaattgcctaacatgtctcacttgatgggttactggtatcatttctgtatcatgtttgaagcattgttcattatgacattgatcgatgctggtactcgcgtaggtcgttacttacttcaagaattattaggtcatttccatcctaaattcaacgaccaacattgggctcctggcgtttatggttgtgcagctttaatttgtgtattgtggggctacctagttctacaaggtaacatcggtattatctggcctctattcggcgtatctaaccaattattaggtactatgacattggccgtaagtactaccgttattatgcgacttggccgcaaacgttatgcatgggttacaggtattccttgtattctaatggctatcgtggctatcgctgcagactttgaaaacgtatttaacagctacattcctgctggtaaatggatcctagtagcgttcagtgctgctatgttcctcatgatcctcattgtattggtagaggctgtacgcagctggattcgcttgtctagcatgcctcaagactaccgtacacaagctgaaattgaagctgaaagccttgtaaaatacggtaaagaagtaaaagcataattctgatttgctatactatacgaacacgcactcacattagtgggtgcgtgttctatttgtttgagtgtcaattaagatacatttgtcatttcatatattctatagaatttattgacatatagttagaaatgctataggatgtaagtagagatgtatttcaacaataaaatagttaggtaacggcgcctagttttcagaatattctgagactaggcgccttttttatgaaaggagtctattatgatcggtatcgatacaggtaatacggcatgggtactcatagcggctgctatggtgtttttcatgacaccaggacttgccttattttatggaggtatggcacgcagtaaaaacgtacttagcactatcatgcagagcttctttctgataggtgtgatttctgtagaatttatgctcataggctacacattgatctttggtgacgatgtacatggtattattggcagcctcaataaaattggtcttatgggcacagagaatagcatcatggaaggtgcgaatattccagaaatggcatttattgcatttcaatgtatgtttgctattatcacaccagccattatgagcggttctattacgggacgtatgcgttttgcaccctttgtagtattcgctgtgatttggtccgtactcatttataatcctatggcccattgggtatggggtggtggattcctcgctaatctaggggcactcgactttgcaggcggccttgttatccatgtattgtctggcgtatcaggtctagtactttgtttgctcttaggtcgtcgccgcggttatgggcgcatgccaatgttaccgcatcacttgccaatgaccgtcctcggtggtgccatgttatggttcggttggttcggttttaatgccggttctgctcttggggctggtcctttggcggccaatgcggtgttgacgactcaaatgtctgctgctatcggcatcgttggttgggtattggtagaaagatatcaccgtggtaaaccgaccgtgttgggtgccgtatctggtggcgtatccggacttgttgcgattacgccagcagctggatttgtaacacctgtagcagccataccaatcggtttcgttggtgctatctgttgctatgtagcggtcgctgtgttaaagagcaagtttggttatgatgattctcttgatgcttttggtatccacggtgtaggtggtatgtggggtgccattgctaccggtctatttgctacggtcagtgtaaatcctgatggtgctgatggtttattttatggtggtaacttactcattcctcaactgatttctctcgttgtagccattgcccttgctatcatcggcacaactattatcttcaaggttgttagtctatttatggacatgcgtgttagcattagtgccgaatccttgggcatcgacattagtgaacacggcgaaggtgcgtataatcaatctgaatttaaaagcagtggacgttttattacctctgaccaacattccttggtataacgtatttatggtgaaagctagctttcacagatggtacaatagatgtaatgaaaacgtagatgaggtgatactatgaaacggatgaaaaaagtagatatcattgctcgggcagagcaattagaagatttaaaagaagccttgaatcgcattggcattcaagggatgacggtctcccaagtatttggctgtggattgcaaaaagggcatacagaagtttatcgtgggcaagagtatgcggtcaatcttgtaccaatggtgaaggttgaaaccgttgtatgtgacgtgcctgttgatcttgtaatggatacggcgcgcgatactttgcaaactggcgaggtaggagacggtaagattttcgtgtacgatgtagaagattctatgcggattagaaccggtacgcgcggtacgaaggccgttactgatgatgaagcttaattaatcatatatttaattaatcatatatgtaatacgcgagctgctacataccttggtgtgtagcagctctttgtgtttatacatttgtgggtgattggttttgtaaaatttaatgctataataattgtatgactagacgattacgctcgtattggagcaaatatatacaactatataagcgaggtatactaggcattattgcatttattggaattacggtagtcattatctccatcttagctactattgcgagtagaggcatgggtgttatttttaatgaggtaatagcacgtcagaccatgatgcgagggactattaccgtcgctagcctgagcgccaccccatgggggaccatatcctttgaggatttgcaatgggctgatgacgatggacatcagttgatgaccgtaccttccggtaagatacgcgttaatatgtgggatgtgattactcgtaattttaaggcatctgccatacgaggcatagaattaaatgatgcggtcattgtagtagatttagatgacgataatcgggtcgattttgtgccggcttctcctgatattaataaacccttatctgaagtagaacagcgacctaaagcacctaaaaaaacgaccctagaacgtcaagaagagctagggaaaaaggtgcgtaactttaattggaatggtcaacatatcgatgcgattgtgaagctttcagactgccaattggaaatattccaaaagaatcgacattatgtgatgaagaatgtgaatgctcgatttgatattgatacgaatcgtgccattcgcatgaatctaacaactggtaaattcggaggcaccgccattggggatggcctcacattggaaggccgtatcgatctaaaagatgtgcttaagcatcgtatgcctacgctgaatatgaatctaaatatttatggtgtagatccggcatccttaggatttggtgatagtattcacgataagatgaccttgctgacagcagtgacgggggatattaatcggccctttgcatcgggacgtgttaccatgccaatccttagaatccctgcactaacctttgaaaatgtggtaggcgatgtaacctatcaagatggcatactggattttaaagaggtatatgcgaatgtatttggcggtaagttaaaggctaaaggtgtatataatctagatacgcgggcctatgaattaacgggggtcgctacggatctagatagtagcatggccttaaaaacaccggattttgctgttcctgtatcggcgaaccttaatttttcaagtaagggacagcctaaagatatggtggtgtggggcgattttacatctggtacaggtcgttacatactcatacctatacaatctattacggggcgctttcacaatcaaggacgtcatttatcgttctttgatgtgaaagtacatacatcggtaacaactatctcaacggatgcattgcatatcgataatggcgaattaacattgggaccattgaatattacatccaatgggggtagtaattttgccatttatgatgaaagtacctttggcgagcttgggcgtacgatggatggtataaaaagtgacatggcgcaggcaaatcagaatatgaaacgcgctcaaggtaatagtcaatcgatgaatcaagaaggtataaagccatcaagtgatgcaaaaggcgttttagatgatgccaaagaagcaatcaaaggattttccgatagcttgaaatcgattaagattcgatgaagtttgaaaattttcatgttcagcttatctcctaagtataaaatgcgaaatgttatcaaaacatttgataacatagtggattatatatgtgttttattaggaggtttcttatgagaaaagctaaaaaattatctttaacacttatggcgtctgttatggctttaggcgttatagcatttacagcacaaccagctaacgcatcttatggctataaatatactgattccattcgtccaccagttttgacacctacaccatctactggtagagcacctgtggaacctgtagccactacagttacaccagctcctgctgctaaaactacaacaacagtagagcctactaaagcggctggttctgtaacaacagctaatactacaaataatacagataaaacagcacaagatattcttagctctttgctttccttgttgcaaaacttgtttaacactctatttaaataataggggataacaaaacggcggtccttattggaaccgccgttgttgcatatacaaaagcccttcggttgcgtccgaagggctttactgtttgtattattattttgtgtttttgtcagttgtttgtgtatgtttaaccttgataagaggttcgtcctttgcagcggattttgtgttggattccactttagaactcgtttctaccttggcagacgtattatctgatggtggcaagaatgtactgatttcatttttgtgaggcccgttcgtattggttgtggatgctagttgcgcccgttgtggagcgatgaaaatttcatccttcgtaatttttacgtcattcaatagtaatttgaatgcgctaggacttacgaataattgaccatctatcatgcgcggtgtaggaagcatagattcagatgtatcaaggttgataatttgcaatttgccttttcttacgatttgcgcttgatctggttggatggctagtgtagcaatgctcatgtctaccaatgcagtttttgttggtgcatcccaagctaccttatagcctaacgcttccgatacttggcgcaatgctacgagcggttggccgtccacataggctacgttttgatggtctttcaccggttctaataccttgccatctacattgatgtgatgttgtgtcgttacagatgcaggtttttctaaattttgagctggtgctggtgtttccatgccgattgctgcatgtgctggttgtgccatgcctactgtgaaagctagcgcacctagagcgatactagataaaataagctgttttagtttcataagggacctccataaggtgttatattgttttgaatatattaatattaccagatgtatatgaatattttattataaactttaatttcatgcaatttaaattaagctagaataagttaatagtttgttttgtaggagtcatagacatatactttgctaaaaaaatcaactatgttatcctaatgatgtatataaaattactagtgcatatagggtgaagattagagtcaagagagaagtaggaatgtcttctaacaataaaaatttttttaaagctatatatatgtttgttgttctttttttattggatgtggctcttgtatactcactagttcagttaggaaatggttcgtatcgtaagatagatgctatagtctgttttggggctattaatgcggtatttatatatctaaattttggggaaataaaagtcatttatagatatataaaggaaggacggtttggggaaggtataaaaaaggctatacgtttattgaaatatagtaaaacaagttattttacccgtatatcaagtataattataggtatttgttttattggttggggcatacaagttgaaagtggtatattgataaaactaatcgcgtttactattggtggtattaatctttggagatcaatataatcattattttagaacatcttaaacaattaattacgtatatagaagcgtaaatataatgaggttgaaccccctatgatataattaagtatcgcatgaattgctccatatattatattattttatagaaagaggttccttatggcatccggcagatctgaaaaagagttacaaggcgtaacgatgttaggtcacaagatcgattatcctactgattatgcaccacaggtgttagaggcgtttgataacaaacaccctgataacgattatttcgttaagtttaattgtcctgagttcactagcttgtgccctatgacagggcaaccagactttgcgaccatctatatttcttatgtgccagataagaaaatggttgagtccaaatctttgaaattatatctatttagtttccgcaatcacggggactttcatgaggactgcattaatattatcatgaaggatttgattaagttgatggatcctaaatacatcgaagtatggggcaagtttacgccgcgcggtggtttgtccatcgatccatacgcaaactatggcaagcctggtacagactgggaaaagacggcaaaagagcgccttcatttccacgatatgcaacctgaacgcgtagcgtaccgttaagatgaattacgaatttatagctgtcatctcggcaatcatattttgctttgtgtttggcctattattgtcattgcatcccacagcgctcgttgttggtaatcatagttccctacatacatacagccgatggacacggtggagtgcttacgtatcgttgatactattagtattgcgaatcgacattactgtaacagacagtatggtgccgtctagctggatgtttagtgaatggtttcagcttgtcaccattattatatttgctctcgtcctactacaaaccctgggattcgtagattttacacatggggaacgaaatgtacagtttcactattggcaagttgagcagggttacagtttaaactcttggatggaacgatatttacaacagcatcctggtcaagtagcaggggcgttggtaaattattgttatgtcttatggatgacatggcgttctatgtggcctgccatattgatgttattctggtataaactatgggctgttgaagtgaatggcttgctttcaccgattatatctagaaaagagcatatgccagatgtggtttcttatttgatattagatccacatattgtaacgtataccttggctggtttcttatggggtcatattgtattgcatgaacgaaagaacatcatcttatatggcaatagcagggctttccagtttgtgctctctaggcttatagttatcgtgggcagtcttttatggataggaattgccgttgccattgtgactgtgcctgttacgtgggattcgataattaacacacttagtaagatacgataaactcagttatttcctataaactgcggactttaaagaccctcaaaattcttgacagatatattcctaggtgttagagtaggaatatatttatagagtgtacaaatgattatacccagtgtatagtttggtaattattaaaaccgtgacttacgcccttgggagtatccaagggcgttatatttttgatagacacactgttcgtgtaatgaacgtagatatggagtacttatgatgcaaggtttgcgcgagttatggggcaaaattcaatataatattaaacgcgtcatggattctgacccggcggctactaatgtgtggatggttatatggacgtatcctcatattacagctttgttctggcatttctttgcacatcgtctctataaagcgggatggcctacattggcacgccgtatagcacttcattctcgtcatgtaacaggtattgaaattcatccgggagctaccattggtcgaggcttatttattgaccatggtatgggtgttgttatcggtgaaaccgccgtcgtcggagataatgtgacattgttccaccaagtaacattgggcggtatgtcctctaagaaaacaaaacgccatcccaccattgaagatgatgtactcattggtacaggtacaaaaattttaggggatattacgattggagctcgtactaaaatcggttgtaatctagttataaaacacgatattccaaaagatatggttatctttgaaacggatccagaaaatatgtatgttcggaaacctagacgaaagaataaaaatagcgcatcgaatgatagtccatatcctgaaaactacatagaatactatatataaatagactggtttagacctcttgctgttagatgcatatctgatggtaagaggtctttttgtggctctctgtcaaatgttggggtattcaccctacgagtcttctttggcaccaatcatagttatggttggtgccattctttttgctcaaaagtagaatacgtactctaaatctaccaaagtggcgaagtccatagcttatccgttttaatactttaattttgttgttagttccttctgtgtatccattagaatatggaagtaagaatgcattagttaattgcgtcatccatgcaggaaatgatgtaaagaagttattaaattcatttaagccagatgcttttactaattccaaccaatgcgttaaatgtgcagctattctttgtttaccatagattgaaaagatttttctaaaagaaagttttaaagcatatgcttttcgtaaatcatcagatattctgagtatttcacatagtttaatatgttcggcttccgttaaatggtctggatgcttcattagtacacgtcgattctgttttaacatacgtgaataagcagccagtttatgttgctcacgctttctaactcgctctaccgcccaatctacaagtcgacatacatggtatcgatcacagataatatgcgcatgtggaaatagcgcctccatgatgcgcttaaattgtatggacatatccattacaataaacttaacttgtaggcgatccttatgtttaaatgatgcaaaatagtggattaatgcttgcgtatcacgtttcggtaaaatatctaatatttcatgtgtatctggattagttaaattaacttggtattggtagccttctgcatttcctttaaactcatcaataccaatcacagtgggtaaggtcttgggcttaggtatagtgatcatagagcaataacgtaatactgtagtaatagatgtatcacactcgttagcaatagctgtataggttacactttcagtaagtttatcaaatagcattctaatattagttacacttagttgcatatgttttcgtacaaatggattgctttcagcaaaagaatgaccacaatgcggacaaatataccgacgctgtctgtattttccaattagtggacctcgttgtacttttccaaactttacagtacgtatgcggtaatccttaatatgctttgtggtttctccacactttgggcaaatatgtgatgttgctggtaattctatgtcaaaaataaatattccgtctaattcatagctatttgtaatatattcttgttttacattatgtaaaaattcagtataatcagtagtaggcatataagctcacatcctttctttaggactttgacacttttattgtaaagcatgtgagccttatatgcttattttttgcaaaaaaataatgttggaagtgacaccgtagtggtgtcaccccaacatttattatagagccctttttgtttcataaaaatttcattgaaaaaaatcgataaagttattgacaatgaaaatcattattgttaatatgattatgtaataaatactgattataaattgcagaaataaataacaggcataaaagccgactggattggtcctgatgttaggacaaattgtaattgagaattaaatgaaaaaggagtaattattatgaaaaacgtacaacaagtaaatcaatatttagcagatctttccgtatggaatgtaaaattacacaaccttcatttcaatgtaactggtccacaattcaaatccatccatgaatacttagaatccatttatgatgaagcctttgaatattttgatgcagtagctgaacatgtaaaaatgcaaggtgaatttccattagtaaattctgttgaatatgctaaattagcaaaaatcggtgagctaggtcaagaagatgttcctcaacataaagttatcgaaattttacttcatgacttcaaatatatgaaagatcaagcttctgctattcgtgaagcagctggtgaagaagataatttcttgctttctaacatgatggaagaccacattgagtattatgtaaaacaaatttggttcattgaatctatgttgaaataattcaattgacaacgccttactgggtatgatatgattacccagtaaagcatggaggattactcaagaggctgaagaggacggtttgctaaatcgttagggcgggttaccgtcgctagggttcgaatccctaatcctccgccatgctgagacctcacatcgtctgatgtgaggtcttttttattgtacgccgaataggcatgactaaacccccagttaaactgggggtcggtaaaaaattcttagagaaaaggaaagaacctcctagtggtaaaatgaagttggtctggcaaccacaacatttcaacataggaggttcaatgtcaatgaatgacgtaaaaagcttatcacatagtaaatggagatgtaaatatcatattgtttttgcaccaaagtatagaaggcaaataatttatggacggataaaagctgatgtaggtaaaattttaagagatttatgtaatagaaaaaatgtagagattatagaggcagaatgctgtccggatcatattcatatgttagtaactattccaccacatttaagtgtatcaagttttatgggatatttaaaaagcaaaagtagcctcatgatattcgataaacacgcaaatttaaaatataagtatggaaatagacatttctggtgtagaggatattatgtggatacagtgggaagatacgaaggagcgataaaagagtatattcgcaatcaattacaagaagatatagcacaagatacattaaactttaaagaatataccgacccgtttacgggtgagccggtaaaataggcaaaataaaagcccccgagtagggggcagccagtggtaatagagtggttgtcagatcattcaaagccctctttagagggccaccactagagaaagacccttatagggtcagagcaaaccacccgttcaacgggtggttatgattgtacgccgaataggcatgactaaacccccagttaaactgggggtcggtaaaaaattcttagagaaaaggaaagaacctcctagtggtaaaatgaagttggtctggcaaccacaacatttcaacataggaggttcaatgtcaatgaatgacgtaaaaagcttatcacatagtaaatggagatgtaaatatcatattgtttttgcaccaaagtatagaaggcaaataatttatggacggataaaagctgatgtaggtaaaattttaagagatttatgtaatagaaaaaatgtagagattatagaggcagaatgctgtccggatcatattcatatgttagtaactattccaccacatttaagtgtatcaagttttatgggatatttaaaaagcaaaagtagcctcatgatattcgataaacacgcaaatttaaaatataagtatggaaatagacatttctggtgtagaggatattatgtggatacagtgggaagatacgaaggagcgataaaagagtatattcgcaatcaattacaagaagatatagcacaagatacattaaactttaaagaatataccgacccgtttacgggtgagccggtaaaataggcaaaataaaagcccccgagtagggggcagccagtggtaatagagtggttgtcagatcattcaaagccctctttagagggccaccactagagaaagacccttatagggtcagagcaaaccacccgttcaacgggtggttatgatttaaccatacagtgtaaggaatggggatagagttgacgtattcatatctgattgcttataatgaattgtataaaatttaatttaaggagacttttatgaatacacaatatacacgtcatttgtcgatgattcgtcgcgcccttagtattgggaccctttgtttagtggcatccttcggtgtggctcatgcggaagactttgcaattcctagtgcccgtcctgtggtagatggtatgagtactgatgatgttaaagtcgtatctgctgcacatcctggtagcgctaaccttattacaccaaatgattggacatacaaagcgttaaagacactggtaaaacatggggccattacagatacacacggatttacattcgatgatagcactagctatacaaaggatgagttgatgccattacttgatgaagttgtggaaaaacgggaacaaatgaacgacaatgatcgtcaatttgcgttgcgtatctaccaagaaaacatgcgtgatgtcatggattatcgcattgaacgagacaaaaaaatcaccgaagaacgccgtcaaaaattagataaaaaacgagttgagaaatctggtaaagatgtaaaggtatccgaaaaacaacaggaatctctcgatgcggccactgatgaagtagcaaaacctaaagaacgggccttaacagatgaacaaattaaggaaaaaatgaagagattcaaaattgatgactctcgtgtaaagactaacggtgatgttcgtattcgctatacaggttccaagaatggaaaatctaaagcagatgcgcgtgtacaaacagaaatgacgttcactctataatccctgtaagggaacaacatgattaattttcttaaaaataagttgtttaccgtccatcagaatggcaaacaacatgttagtgaagtatttaagtatatcggacccggtattattgtaaccgtcggatttatcgatcctggcaactgggctgccaacttagcagcaggtgctagctatgggtatgaattgctatgggttgtaacactatctacgcttatgctcatcttattgcagcataatgtggcccatttggggattgtgcgggggcaatgtttagcagaatgtgcttatgaattcttaccgaaatggttatctcgtacggtgcttagtacggcagggattgcggccgtagccacggcgctggcggagtttattggtgctgctattgcattaaagatgctctttggtatccctctcgttatcggtagcgtgttgacggctatcgtatgtacaattatgctcattacaaactcctatagtaaattagaacgtatcatagccgggtttgtatcccttatcgcattggcctaccttgtggaggtcaatatggtcgatgttaattggactgcagcgggtattggctgggtcaatccgagcatacctaatgaatcgatgctcgttatcttgagcattttaggggctgttgttatgcctcataatttgtttttgcactccgaggtcatccaaagtcgtcagtttaatcgacaagataaggagattatgcatcgccagttgcgatatgaattcgtagatacattattatctatgggcattggttggatgattaactccgcaatgattctattggcagcggccgtattttttagtcatggcattgctgttaccgaattagaacaggcagaggaattattgagacctttaattggacctgctgcaggtactatctttgcattagccttgctgtttgcaggtattgcatcatcggcgacagccggtatggctggggcgagcatatttgccggcatgtttggcgagtcctatgatatgaaggactttcatagtcgtttaggattggggttaacatatattcctgcactattattgatcctgtttattacggattcctttcaagccttgctcgtttcacaaatgttcttgagtttacagttgccgattaccatattcttgcaattatatatgacgagtagtcgtcgtgttatgggctcttatacgaaccgccgatttacggggattattctttggggcattggtattatcgtaacattgatgaatatttacttattagttataggctaatatataccgcttgtttttgtgaaagctttcacagaaataggcggtattttattttgtttagaaccagaaccaaatagatttatgaaatgtagttgtagtaacgtataagcctgtgaaatatggtacaataaagaatagaatttaatttgctactatagcagtttatatatgtttttgggaggattttatggcaacagaaaaagatatgaatgaattaaatgcaccattacaatctgattataaagaggttgttcacgacattgcagaagaattattagcgcgtcttaacattgaagaggatagcgctattatcgatatgttccaaacaggctccttagatccttggcaattatttgtgttcttctccgcattagaacatgcacttatggagtttagaacggacaaacgcaagaaaaccgttattgttcatgctcaaccagaggctcttgtaggcacaggccctgttgtaacaccggtatccacaatgcttgagcatattttaatgtctcgcgtaaatgatatgagcgaaggtcgtttagaaacaggtttgcttaccgtgtctggtgaaagcatcgattacgaaggggttaatcttaagggacgccatgtagttatcatttgcgatatccacgataatgaatctccttatttggcagaatgcattaaattgtgtaaagaaatgaaagctagtcacgttgtggcagtgcctctcatgttatggaatccagatcttatcgataatttgacagaggaaagtatcaaggcggaattgtcccatgaaaatcgtcctctctcctagtaagacaaaaacaatatcccatactgcagaagtaatccgtgatggtcaatttcagccccttattacgcaaaagattatacaacatgtacaatctctcgatgtagcagcacttggtaaggccctaaaactaaaaggtgataaggcacaatctgttttcgatttttatgaagagtttgagtctcatcctgtaggttttgcttgtgaaagctacgatggcattgcctttaaatatttagattgggcagggctatctgatgaggctaaggcatttggtgaaactcatctcgctattatgtctgcattatatggcgttgtagagcctacgatgggtgtcagagactatcgattagatatggttgataaggtagggcttaatttatatgaaatctggcgtgaagtggtggatgcatactttcacaaggaggattggatcctaaatctagcgtctaaagaatatgcaaaaatggtgaatcatccaaaggtggtaaccgttgaattttgggaattacgaggcgacacatataaacagatgagtacgtcctcaaaaatgagtcgtggtatgatggcgcatgcatgtttgacgaaacaagtgaagtatgtacaggatttgccacgcgaaattaatggatttatctgcgttactgatattgagtccattaccataccaagcgaatcgatgacggttcgttatgaaaggaagtgatgatttgcaagtgcaagatattctcgcaaaagacctcgttggcgatgaatggctgacagaggatgagctaaggtttctcatgtctgtaactgatgaagaacagttgcagttaatctataaaaaggcgtacgaagtgaaggcaaaatatgtacagcctgtagcgtattatcgtggcctcatcgaattctcgaaccgatgcattaaaaactgtaattactgcggtattcgccgcgaaaatgataagacggaacgctttgatatgaatcgtgaagatatcatcaagatggcgcagtgggcgtatgaccatgaatatggttctattacgcttcaatctggagaacgttgtgatgatgtatttgtcgattatgtagtcaatcttatccgcgacatcaaagccatcggcgatggttctcttggtattacgatgtgcgtaggggagcaaagtgaagaggcgtaccgccgcatgcgtgaggtgggtgctagccgttacttattgcgcattgaaacgacgaataaagagctatatcacaaaattcatcctcgcgatgaactccattcctttgaaactcgagttgaatgtctacgccgtttgcgtcgtgtaggatttcaagtgggtacaggggttatgattggtctgcctgggcaaacagaggaagaccttgtgaacgatatcttgttctaccgtgatatggatatcgatatgattggcatgggtccctatgtggtgcatcatgatacgccattaggccaagaggcattagcaatgggcattgatgatgaggctggtaaattgcgccgtattcaactagggctcaagatgattgccttaacgcgtctattcttgaaagacgtaaatattgcagctactacagcgttacaagcattagatccactaggtcgtgaaaaggggctcgctgcaggtgccaatattttgatgcctatcattacaatcccagaacatcgtgccaaatatttgttatatgataataaaccatgcgtggatgataatgcagataaatgtaaagattgcttgacgcgtcgcgttatgtccattggtgatactgttggatggaagaaaaatggggattctaagcattacggtaagagaaccgggtcattttaaacacattgatatagattattgattaaattgtttataattgttatatttatgtagaaatataaataaaacccagatataataagaacatagtttattttgttttattatatgaggtgattttatggaaacaaaatggtattctgacttttggaatctattgactcaaccattcaagggtggtatcgatcaagtcgtacagtatggtacattgaaaaagggcttcttaggaactgcgcttttatgggctattccttatattttactaggcttatttggggccttgttgttcccattgcttcctagaagcgaattttctgctatgggcatgctccttggggctggcgtaggcttcttctttattttagcctatattgctagtatcatttggtcctttgtcatggtggctgttgggtcctatgtatttaactgggtggctgtaaaaatgggcggtactgacgatgtacagtctgttatgaaggtccaatggtatctacaaggttatgaagtattattatgtacttgtgtgtatacaattgtttttattctcatggctatcttcggtggcctatttggtagctctacattatccaagcttatttctaatttaggctctttagtaatttttgttttatccgtgtgggtaggccttgaattaatggcaagacaaactacgttgactaagatgcaagtattcattgccggtatcgtaacatttgttatcttcgtcattatttcgcttattttcatggctctttttggtggctgtgcagccttggtaggccgataatttcattattataaaaaatcctcttttttcgataaatattttttcggaaaaagaggatttttatagtattacgtcgaaatcatatatcaagaactcaaagtttcacataaggaggcgattccgatgaaagaatatagtagtgatcagattcgtaatgtagctgtggtgtcccacgatggggcggggaaaacggctttagtagaatccttgttattaacctctggtgctgttgattttgttggccgtggtcaagataacaaacatattatggactttgagccagaagagattaaacggaatgtaacgattcaattgggtatggccccttgtgaatggcatgaccataaggttaactttatcgatacaccgggttacaatgaattccatggcgaagttcgtgccgcattgcgtgcttgtgatggcatgttaatggtattatctgcaacgactggcgttgaaacagatacggtgcgcgcgtgggattatgctgttgaattacaaatgccacgtatggcatttatcaataaaatggacgttgatggtgctgatttcttcggtactattgaacgtatgcgtgaactatttggcaaggcaattatgccactccaaattccaattggcgaaggtgccaattttgaaggcgttatagacgtagccaaaatgactgcgtttacttacaaagacggccaaccaacagagattgctgtaccggctcatcttatcgaaaaggcccaagaaatacgggaaatgaccgtagaggccgcggctgaaggtagcgatgaattgttggaaaaatatttagaaggcgaagaactttcgttagaagaaattcgccaaggtctacgcgaagggatgattacaggccgtgtgtgtccaattatgtgtggcagcgccacatcccgtattggcttagatcaagtattagacagaatgattcggtatatgccagatgcagcaaaaaaagtgatgactgctgaatcagcagacactggtgaaccagttgtggtgcatgtggataaacccctaaccgcattcgtgtttaaaaccttgcttgacccattcgcaggcaaacaaagctttgtacgcatcttctctggtgaactcaaagaaggtgataagctgttcaacgttaatcaaggaactgaggaaaaatggaataagatggttacccttatcgggaagcaacaaattccagtgactgccgcaaaagctggcgatatcgtagtgataccgaaattagctaatgcaaaaacaggcgataccttaacagctcctgattttaaggtgaagtacgatgcgattcgtttccctcaacctttatatactgtagctatggaagctgtgaaaaaaggtgaagaggaaaaattagctagtgctgtgttaaaagtagccgaagaagatccgacttgtgtagttgtgaaaaatccggaagctcgccaattgcaaattgactgcatgggcgaagtgcacttagaacatatccttaacaagatggaccgtaaatacggcgtacaagcgaaacttgtaacaccatatattccataccgtgaaacaattaaaggatctgcagaaacagaatcgaaatataaaaaacaaagtggcggtcatggtcagtatggacatgttaaaattcaagttgatccattatatgatggtcaagaatttgcctttgtagacaagatttttggtggtgctgtaccaagacaatatataccagcagtggaaaagggcgccagagaaaccctagaaaaaggcttaattgcgggatatcctatgattggcgtgcaagtgacactcttggatggatcttaccatagtgtagactcctcagagttagcatttaaagtagctacgtcacaggctatcaaggatgtaattccaaaggcgaaaccagtcctattagaaccaatctatgaagttaacgtgtttgcaccagatgctttcatgggtgacatcatgggcgatttaaatagtcgtcgaggtcgtgtattaggcatggaacaaagtgaaagaacaggtatatctgttgttaaagcacaagtaccgttggcagaaatgtcagattatgttactgttttgcgctctatgacacaaggacaaggcgtatttaatcgtcagttctatagttatgaagaggttcctcataagcaagccgatgagattatcgctgcttttaaggaaaaagagtaatataaaattgtccacgtagttaattctaatatgaattaacatgtaagtaacaactacatatacaatttcatagacaacttcatatgtataacagtcttgacgtgagtcataaaactgaatagtattttacaaaccctccatatatgtagcgtatggagggtttatatttatgtaatcctatgtggaagctaagctttttatgtgctacgataagagtataaagatcatattgatattgtatttgaatatagtatgtctatacagtatggttcttacagaaaggatatagttatgtttttctccagtatacatgcagattatacaaaaatgggctacccagcagccattgttcgagcccttgatttcttaaaaaacactgatttacaagcattgccaggaggtcgtcatgctatcgaaggcgatatgatgtatgccaatgtagatgatgtagaaacaaaattatttgaaactacaaaaccagaatctcataaaaattatatagatatacagtttatggtgaagggtcaagagaatatgggcttttttgtggaccatggccgagtaaagcctatcgaatcctatcctgaacgagactgctatttttatcctaatgaatctgtagatgaaggtcacatccactgtccagaagggtattatacggtatttttcccatcggatattcatcgtcctcttttagcggttgacgataagcctataaaaattcgtaaggttgttgtaaaggtgcacgtgtctctattaggtgagtaacatgatgaaacgatatgaaattatcggtattatattaaccttattaggcgccaccttgtggggcgtgtcaggcacatccgttcaattcgtaggtaatttccgcaatatgaacctagaatggctcttgacgatgcgtcttattacggcaggactgttaaccgttctatatggatggattcgtcaaggcaatgctatttttaatgtattccgtaattggcgagatacattaggactcgtcatattcggcgtatttggtatggccctgtgccaatatacctatttccgttccatcgtcatcgccggtgcgggcattgcgacggtgctgcaatatttggcgccgtctatgattatcatttatttgctgatgcgttatggcaaacggccgtccacaggagaaatcatttcagttatccttgctttagtaggtactatttgcttgatgggaaataatggtttttcttttgaaagcttccgcagtgatgtattattctggggcttattatctgccgttggcgtagccgtatatagtgtttccccagtacgattattagctacctatgggacaattcctattgtaggctttggtatgctccttagtggtcttgtggcagcggcgcttttccagcaacctcattcgtatgcgacgtgggatgtatggactgtggtaggctgttttaatgtagtttttcttggcaccatcgtgtcctttaatgcgtaccttgaaggggttaaacgcattggtgcggttccaggatcgattttgtcatcgattgagccgatttcagcagccttctttggatgggctttgttaggtaatcaatttaactgggttggtatcttagggatggccatgattattgctacagttatcatcattgccttagaaaaacgaggtcaatcatcttaatgataaactttttgtaatagtaatcaatccttatgcggaggttgtatggaagaaaaacagtggataggcatgggccttgccattatgggggcactattttgggggctttcaggtacatcggtgcaattcctcgaaaatgcaaagcatttaaatgtagagtggctgttagaagtgcgcttacttttagcaggtttattaacaattctactctcctatatacaggatgggatacgaatttttgatatatttaaaaatccaaaagactttggtaaactcctcatattcggtttattgggcattgcgttagcacagtactcgtactttaaagctatcgctatttcaggtgtaggcgtggctactgtattacaatatgtagcaccgacgttgctcattatttatttattcttacgatattttaaaaagccatccttaccagaattatactgtgtggccctcgctatgattggtacggtgtgtattatcatgcaaaaggggctaaatctatctgcatttaatggggatgctttgttttggggcctcatttctgcggcgagtatttgtgtttacacattggaacctattgaactcttaaaaaaatacagtacatcatccatcgttggctttgggatgtttatatctggcattttggcgtgtatcgtattccgtcaagtggcatcagaagctatttgggatggtatgacttgggttggtttgtttacgattattatcctagggactgtagtatcctttaatgcctatattgaaggtgtgcgtcgtattggtgctattcaaggttcaatcttgtcttctttagagccgatttcagccgccttgtttggctgggctttgttaggtaatgaatttacattagttggtatattcgggatgttctgcatcatcgcaaccgtatttattattgcctgggatcgacaccgtcaaattaaacgagaagtactagaaaaactgaataaaatagaaatgaaataaacaaacgaaaacacatataccatgaggtatatgtgttttttgtaatcaaatattatattttttctaatattttttcaaataatagttctagtttctgtaagtcgccatgtacggttccgtccatataggtattatatacagtatcatcttcagaaacacgaatttgagctttatacccctttgataatgctaatactcgaataacttcacgttgtgtgcgaccattaccttccctaaatggatgaaagaaatttaggcaatctaagattttagctaagttcttaattatactttcttttgtattggttttttgatgatatgtatttagcaaatcatttataaagttctcggcagagctaaatgattgtatcgacataaaaggattgccactctttgtaatattaacttttctatattgaccggcccaagaataaacatcttggaataaatacttatggagctttagtatatcagtcatagaatatactggaattggtaacatatataaatctgcaagccgttttgatacatataaatgctcattattttttgctaagttaggatctagaatgttttgtttatttattaatacaaatgaattttcataggtatagaaattatctaaatctatgtactggtaaccttcgtattggttcttagccaatttgtagttccttccttctgtttgtaacataattttttaattctagaactgattcagttgtaggagtgaagtcttcaatcatagatgaacctacggcataccaaactgcatcaaagtcctcataattatcaaattgtacatctaaaatggtgagtttttctttattaacatttaatgtcataggcacctcctttgttactattattatatcatagctagtctctttatattgtatacatgacctatttggttgactatttacttatctattcatatagttaatatataagtactaattaatttttaggaggttcctatgtctgtaaaagatttcgtacaacaacgccgcgatgattttatcgctatgcgtcgagattttcatatgtatccagagccagcttggctcgaatatcgttctgccgctaaagtagctgaaaagctaattgctttgggttatgatgtggcactcggtgcagaagtgcttgatttagattctcgtatgggcttgcctagcgaggatgttatgaaagcagcaatggctcgtgctatggatgaaggtgctgatcctgaactagtagagaagatgggctatggtaaaacagctattgtggcaactatgaagtttagtgatgatggtcctgtagtagcgttccgtgcagatatggattccaatgatgtaatcgaatctaaagcatctaaccatattcctgctaagaatggtttccgttcccgccatgagaaggctatgcatgcttgtggtcatgatacacatatgacaatgggtcttggccttgctgaatatattgctacacataagaatggcttgaagggtactattaaacttatcttccaaccagcagaggaaggcgtacgaggtgctaaagcgatggtagaggctggtgtagtagatgatgtagacttgatgttcggcatgcatatcggatttaatgaacagttatctaattgctttgcttgtagtgatcatggctttttagcgactacaaaacttgatgctgtattccatggctattcttcccatgcaggtggttctccagaaaaggctcaaaatgccatgcttgcaggttgtacagcggttattaacttacaagccattgctcgccatagtgggggtgcatctcgcatgaatgtaggtgtttttgaaagtggtacaggtcgcaatgttactcctgatgtagcaacacttaaattagaaactcgtggtgctactactgaaatcaataattatatgattgaacgcactaagaccattattaaaggtgccgcagaaatgcatgattgtacctttgaaattacaaaacaaggtgaaactcctgcaggccgtattagcgatgatttagctcgcgaagtacaatctatcattgaaccattaggtatctttaaagaagttccattcgattatagcggtggcggtagtgaagactgtgcttacttcttaaatcgtgttattgatcgtggtggtcgagcaacctatatggtattgggctcagctattaaagcacctcatcataatccattattcgatatcgatgaagaagatatgttaaacggcattgttgcattaggtacaattgctactcactatttaaaataggacatattgattgagatattgcgatgtatatatccgaactatagatacataactatatagatgcataattatatagttgcataactatatagatggatgcatagaaatatgtatagtgtgctatatattagatgtaatagggggattagattgtgaggtgttatatgatccaacgagagcgtttagctaaggactttgattctatggcacagttgactgcacctggtgaaggtataaatcggctagctttcaccgatgcagattggaaggggcgccaatatattattgaccgcatgactgatgcgggtctaactgtagagagagatgattttggaaatgtgctaggctataaggtaggtaagaatcctgatttaccggttgtcatggttggttctcatacggacagcgtgcctaatgggggcaattatgatggtgttgtaggtgtattatctgctatcgaagcggttcgcagtatgactgatgatggttttgaacatgaccataccattgcagtagtagactttatgtgtgaagagtctagccgctttggagcagccacattgggcagtaaagctatgcgcggtgaattgacattgcaagatttacatcgcttagtagataaacaaggtgtgtccttgtatgatgcattaaaagagcgtaatttaaatccagatgctattgagcatatggaatataagagacctgtaaagtctttcacagaaattcatattgaacagggtaaggtgctagagcacgaagcaaaacctatcggcgttgtaactggtattgccgcaccagagcggttctatgtaaccatccgtggcaatgcggatcatagtggggccacacccatgaacttgcgtcatgatgcactctgtggggcttctaaaatcattctcggtattgaggagattgcatctatgcaagaagagcctccagtagtgggtacagtcggtgtagtagaggttgtgccaggcgcgatgaacgttattcctggggctgttaaactgggcgtagatattcgcagtatttctaaggtagcccgagattctgtagttaccctcattaaagaatttattgatgttattgcagagaaacgaggcttatcctatacgattgagcctgttgcaaaggatcatcctgtagtgatgaatcccgttatgattcgagaaattgaagaggctgttaagtctgtaggcgtagattatatgactatgccaagcggtgctggtcatgatgccatgcattgggctgatgatgttcctacaggaatgatttttatcccatgccgtgaaggtatcagccataatccagctgaatttgcagatatggatgacatcgttacgggagctaagatattagacacggtgctaagaaagcttagcttagaaagtactaaacttaactaggttgagtattgtggaatatttgaggtagatataatttagttagatctgtgttaactagctaagatatcatattttacgtggttagaaggatgtattccgtaatagaatggcagagaatacttgctattggtagggaatacacggattggagagattatggttattgctggtgttgttatcgtagtggcaacgtttattgccattattaagcagtttgaaacacggcttgtgttgttattatcgggcttattaatgtgttttataggtgggcagcttagtgctggtacgacagcctttgtaaaagagcttacaaatccaggtcttgtaccaactatttgtacagtgcttggttttagttatgttatggagtatacaaaatgtacagagcacatggtatatttcatctctgcaggccttaaaaagatgactaaaatcatcattcctggtgctgttattattacgttcttgatcaatattgcgttacctacagcggcaggctgtgcagctgcagtaggtgctctattaattcctgcacttattcgctccggtgtgcatccagcgatggcaggttccgctattttcttaggaacttggggtagtgcattgagtcctggtcttatgtttaaccctcaagtagcacaacttgccggtgaagacgtaatgaccgttatcgctagcttttctatgcaagccattattggcattgtcgtagcagctattttgctcaatatcgtagctatcgttaagaaagagcatacaggatatgtattgaaagaggctaacgaagaagaaggcaaagaatttaaagtaaattatttatatgctatcatcccaattattccgcttgtattactcgtactcggtagtaaacaagtagcagtgattcctgaaatttctgttcctgtatctatgctcattggtacagctatcggtattattgccgtacgtcctaatgtaacggaagcagttaagaaattcttccgcggtactggcgatggtatgtgtgatgtagtcggtcttatggctgcggcggcagcctttactgcgggtatgcagtacattggacttacaagtgcactcattgatggtatgaagaactctcaacaaatcgcccaaatcggtgcagcctttggtccattcttattagcagttatctctggttctggtaatgcagcagcccttgcctttaacggagctgttacaccgcatgcagcagactttggctatggcatcatgcaattaggctccatggcccaattaggtgctggcattggtcgtagtatgagtccagtagcaggtgcaggtattatcattgctggccttgcaggtattaaccctatggaaatggcaaaacgcaatgctgtaccatgtattattgctacagtagtgattatgctattgttactatagttctatatggggtggcttagtaaaagcctaataattactatgattaaagtagttatataaaagaaaacccgtcatgattgaaccgaccccttaatgttagaccaaaaatcttaacgttaaggaggtcggtttttctatggcaaaatatagccttatatttaaattaaaagtcgttaccgcatatctaaatggcgagggtggatatgagtatttaactaagaaatatggtgtaaagactacatcgcaggtacgtcgttggattagtgcatttaaagaatttggtaaagatggtttgtgtcgaaagcgacataatacaagatatacttcagaatttaagctagctgtggtagagtcatacttaactagtgaattatcgtatcggcaaattgcattacaatacgggctgaataatccttcattaatagctcgctggaaatcggattttatgaaatatggggccaatacttttgtcgagcgaccgaaaggacgaatacctaccatgagtcgaacagatgaaaaagcaaagattagcacacatactaaatctcgtaaccaaaagaagaaaaaagaattaacaccagagcaagctcgtattttagaactggaaaaacaattacgctatgctcaaatagagaatgcctatttaaaagaattgaggagattgcgcctcgaggatgctcggaaaatgaaagagcagcaagaatcattagcagtctccgaagagaattcaaactaactgagattcttgctgccttatgttttccaaaagcaacatatatgtactggcaacagcgctttgaccgagtagatccagatctacaaatacgaatagctattgaagatattcgtaaagaccatcccaactatggatatagaagattgttaccctcgttacaatcacgaggtattgttgttaataagaaacgattacaacgaattatgcaaaagttcaatttgcaagtaatagcattttctcgtaagagccgaaaatataactcgtataaaggtgttaaaggacggattgcacctaatcgcattaagcgtagattccattgtaatcaaccacatcaaaaaattactacagatacaactgaatttaagtattatgaactagatgcaaatggtgctttgaaagtcagaaaactatacttagatccatttatggatttatataatcttgaaattatcagttttagtataagtcctacaccatcagctgagtctatactttcagcacagaaacaggcgattgaaaagactgctgatgctaagtataggcggacatttcattctgaccgtggttggggttaccaaatgaaagcgtatcaacataatttaaaagtgcataatatattccaaagtatgtctagaaacggtaattgtctcgacaattcaccaatggaaaatttctttgccatcttaaaacaagagctgtattatggcaatacttttcatagctatgatgagttaaaaatggcgattgaaaactatattatgtattacaatactaaacgaattaaggaaagattgaactggctaagtccaattgactatcgtttagctactactgcagcataaaaaattccgagcaaccagttttggttactcggaataaaaagtctaactttttggggtcactacatatctgagttctgagaacagctctttttatttgtttatatagtttctttaatgcatttgcactattttcgttgtattacggcattactttagttttaacgcaacccatagtgcagcgccgataaaggtaaggctacatgcccagaaaagggttgtgaagccaaattgagcggctacaatggaaccaccaaaggagcctagaaagtaacccatagacaaacaagactgattgtacgagaatatttgtcccgtatattccttaggtgtttttgatgctaaataggtattgagcgcaggtaacataccacctagcccaaaaccttgcaagaaacggataaacccaagtacatacacagagtccacataggcttgcggtatattgagtagacctacatagatcatcgagtagatgagcacctttctagggcctatacggtctactaatttcccgagtggagagctactaaagaattgggcgatacccatggcagagaacacagcaccagaaataaaggctatattttccgtattgcttggtagcattcctttaatgtaaaccgtcataatgggggagatggcggtaaccgaaatggcatacaggaaggaggttgcagataaagcgactaaactagaaaactcaggtaagtgagtttttagatttctaaaggtttgcttctcaacaagtggctttggaacatagttttcatgtaccagcattgccgtcaagccaaaagagataagcataagggccccgatgataaagaagtcatttcgaatacctactacatcactgagataccctcctacaagcggaccggctagtgagcctgcaaggctaaaggatcctataatccctagagcccaacctgtatggttttgcggtgtttctgacgcgataagtgttaccgatgcggggtaaaaaccgcttactaacccttgcaatgtacgaacgaggaacacaccttctggtgtagtctgaaagcccaataatatactacatatagccataccaagactagagcgtatgagggtaatcttacgtcccttacggtctgctaatcggccccagaagggagctgctaagcagacaatgaggaaggtgatgcccatggaggcaccggaccattgtgctatcgatcctgtatcgcttaagcccatttcatggaagtatagaggaagaatagggcttacctgactaaccccgagggacatgaagaatatgcagaatgcgcaaatgtacaccgttcgtttccacgtttccaaagtatccctcctttagtctttctttttaacttcttcccaatcgcttaagtccggcagtttattgcttgttatagattcttgaatccagtagttaatagaggttaagttgctagaatcccgttcaaagccatatacgatctcgtctcctatgtcgtcttctgtagtgatatagaggcgaatgtgtaagtttttaccttttccgcgctcgatgaagtagctaatacccggatcgtcgaggttggatgggcgaaccgcaatgatatcgtacgtgccattggctacgccttctaaggcatccttaatcatttgattggaaagttcatattgattgaggtagaaaatatcgttgtcgcaagttaatacatattctcgaggtggcgtagtatttttgtactgtttctcccagctttcatcaatcacaggcaatgtagcatgatcatagaattctttaattaaacggagaccttcagaaatagacatctccttaaagtctcttatttcatatatcgtaggctccaaggtttcatcacattccgcaggatcctcgctgtagccgtataaatagatattacaagtgttcttatcttcattgtggaacataacgatactgtatacatcgtaaattacgttttctatggattggcgattatcgtagatgataaaactgaggtatttttgtgtatcccattcgcgttcgatgaacggccagtcgtatttattggtacgccaaccagtagtagagtcctcgaaaatttctaatacatctacggagttttgaggccatgcaggtggcataggattacacgttgtagaagattgcgttatcccttctttgtactgataatgtccatcaacgagttcaaaggcttctaatcgctcagatgcttcgtcaggaattgccaacggctcaccagtgcctaaccaattatcgtttcttgtgttgagacgattgatgctttcacgagcatgctcgtagaacgtaacggcttggtctaaatcgggttcttttgtaatggcaccaatttcgtagcaatagccggctgctagttgccatagatggtccgcatagtcataactaccgtatctatcgaaacatttgctagccttattaacgcactctatggcggttcttatggcaggggtattaccttttttgaaagtaaatacataagcgagatacggccaaatcgcatcgagagtgtaaatcgctggttgttgtaataagtgagcgatgcgagaccagtcttgggactgaccatcgatattcaatgtgcgaagaatgatggcttgcatggtaacataagcatggtcattaaagtctaaataatttgggcttatagcagcacgctcgtaatatctgagggccttttgaatattctgagggattcttttgttagactcacatggttttgcatagtactcggcagcttcacgcaaacacatgccattattcatggcggcaccgcgctcaaaatattcgagtgctcgttcatgctccccgcgagacttacaaatatcgccagctaaatacatcatgagtggcaaacctgctgcagccccttcaaaaatgacttgctcttccatcttcctattatcttgctctatataggtaatgcgcaagttgcggtatgcaataacaaggcctgcttcagcggatttacgcaaccattgctgagcaatggcagttattttatttgcgaatctacgttgatctgcttgggcaaacaagccttttaagaaacggacaaaggaagatggttcaccttcattagccaccttttgagccgatggcaagatgtggtaatccccccattggaatacattggcaatggcataggcacagtaggaacaacccttttgggcgccctcatagacgcgctggaaggcttggtcctttgtcataggcaactctttttcaatcgttggtgtaagggcaccagaggtacgcatagcttgtaaaatagcgatggcactgcctttgcgaatagctgtatgtaaataactatacgcctttgtgtcatcctcaggaaagcctgcttcaatccaggtgaactgagggccagaatagacgcgcgccaaaatagcatacacatcgccgatacctggaatcttttgaccttcctcgtcaagttttacaagggcatcaagctcggccttaccctcccaagcgatatctttattacattgatggaatattttattgaaagactgctgtatttgatcagtaaaataaaaactcatgctctctcctccgcataataatcagtagaagctgataacatatgtaatttcattatactattagtgtttagaggaaaacaatataaattatcgattgcttgaggaataatatattcaattttaattatttatattagaatagatagaaaactgggtgtgatataacaataaaagggatgaatatgagaaatataaattttgatatgatgattgcagccttagttatgttgattcttaattgtagagggtattataagtacgttatgggcaagcaactctctgagcgtgaagcagataggagagaatgtatgctatttcccaatttatataaatgggtctgtatatgtagttcgttattgatagctgttgtgctgttctattattatattgaaggtctgacagcaaattcttttagattactgttagttacgggtatttcttttggtattagtcaaattttacagattgctcaaaggaaagaatctaagtactacaagaatagcttagttgtaattgtatatttgagtcttatcattttactgtttatctatatgttttttaattgaattttatagttgtgatgtatagatataattaatcctgagagagaagagagctttattttaatgtggttacataatgaaatttcactatttaaacaaaatatagaaatgttgcgagtgaatcaaaggataggcagactagcatatttgtggggtgtacttggcttaatggttagtaaatttttagcctatcttatatttggtttattggtagtgcttattcaaggtagttcactgcaagatagtcagtatttgtcttatatttattttggatgtctacagattatacatgtaattgcatctatttttatcctcaaacgtagactaaatgactgtggttcatccttgtggtatatgatcttagttcccatagcatgcctaagtttgtgggtgtattgggggatgagtttcagttggaaatctatatctgaaacctttataaatacaaacttttattgggacggattcttctgggagtattttgtcttggcttgttttgcgttgcctcttagtgtgactgattctaatgagtatggcttagatgaagggcgggatagctataataactatattattgcctacgatagaagctccaccgttagtgaagataaagatattggtacattcgactatgtgtgtggttgtatatgggatgttttatttgttaagccatttgatattaaaggaagagcttccgtatcagctttttgggttggtcttgtaggatctcgtcttttcatggatgttattatgtatatggctatatccgtagtgtcgttaattgttcaacttggtatccctctttatataccacgttggggttttatggttatcctaatatggccagctatagcaatgattacattaagtatacgtagacttcatgattccctattaagtgggttatggattattggccttttcgttccgtatattaatatttttgttagttatcatcttttgtttaaaaaatcttggcatattgaaagttaagattttccttgactttcattctatagaaacattataatcagattataattttatactcgcctaaaagaaaccgatgaggtggagataaaaataggaaatgcactcacagagagcgggattagctgagaacccgtagtacgcagcttattaaatggaccaccgagggcgcatggaaaagaatgaatttcattcctagtatggtgcgacgtcacacgagcgttagtcgtgagggatatgttagtatcctgcgaaaggggaatgcgttgcattcaaacaaggtggtaccgcgatttatagcataatacaagtattttctaataattgtataagaatagaactatagactcgtccttgacgttacattgtcatgggcgagtttttttattggcaaacgccagatggaggttctcatgattttccctagtcttgaccgtgtgaaagctatcgcaccaggctacgatattgtgcctgtatatatggaaattttatccgacgtacgcacaccgattagtgtgttgaaagcattaaaacaagtgagcagtcatacgtacttgcttgaaagtgcggataatagtaatcattggggccgttactccttcttgggctacgatcctaagattgagctcttctgcaaaaaccataaaatgactatcaaagacggtacaacacgtacctttgagtgttctgacccagctgcagaaattcgcaatgttttgcgccaatataaaagccctcgcttagaagaattacccacctttacaggtggctttgtaggctacttcgcatgtgaatacattcgctacatcgagccaacactagatttcccaacgccagatgatgactctgctatggtaaacgatgtagaccttatgctctttgataaggttatcgctttcgaccattacaaaaataaaatctacttgattgctaacattagcacaaacgatttagaacgcaactacaacaaggctgagcttgagttgaaagcattagctgatctcgtagtaaacggtaaagaggcggatattccaaaaggaatccttaaaacagaattcacttctgaatttacaaaggatgagtttgaagcagttgttaaaaagacacaacactacatcaaggaaggggatatcttccaatgtgttgtatctaaccgccgcgaagccgagtttgaaggcagcttgttaaatgcataccgcgtattgcgtacattgaacccatcgccatacatgttctacctatctggtggcgatgtagagcttacaggtgcctctccagaaacattggtaaaattgacagatggtaagatgtacaccttcccaattgcgggcacaatgcgccgtggcaaaaacgaagcagaggaccttgcgattgaagaaaaactcattaacgacgaaaaagagttggctgagcataatatgctcgttgaccttggccgtaacgacttaggtaaaatctctaaatttggttccgtgaaagtagaggcgttacatatgttgcaacgtttctcccatgtaattcacattacatctactgtaagcggtgacattcaagacggcaaagatgcattggatgctatcggtgctacattgccagccggaacattgtctggggctcctaaaattcgtgctatcgagattttacacgaactagaaaaaagcccacgcggtgtatacggcggcgctgtaggctacatcgatttctccggtaacatggacgtatgtatcggtatccgcatggctatgaataaaggcggtaaggtctatgttcgcgctggcgcaggtatcgttcgcgatagcgtacctgctagtgaatacaatgaaactttgattaaaggccaatccatgatttccgcaattacagatgcacaggaggtagaataatggtactccttatagataattacgatagcttctccttcaatttataccaattagtaggctctatcgatccagatattaaagtcatccgcagtgatgaattaacagttgaagaaatccgcgctttgaaaccagactgtgtgatactttcaccaggacctggcagaccagctgatgcgggcgtatatgaagacctattgcgcgaatgcaaaggtgaattcccaattcttggcgtatgccttggacaccaagccattggcgaagtgttcggcggcaccgtttcctacgcaaaacaagtaatgcacggcaaacaaagcgtagcaaaacaagtacacccatccaaaatccttaaaggtgtaccagaacaattcgaagtcgctcgctaccactccttggcgattgtagacgaaacaatcccaagcgaactcatcgtcacatccattacagacgacggcgaagtaatgagcgtagaacacaaagactacccaatctacggcgtgcaattccatccggaatccatcatgacgccaaatggggaacaaatgattcgcaatttcttatctaagtagtaccaggaccggtattgtcttatatacatttgtagtcgagatggaggccctaaagcctccaccggccagatctgtccctgcgggacagggccaaagtcgttttaggaccaccatctcgacttcatctttatttaaatccaaatccggtcctatgaccacttttaataaaaattgcgaatcatttgtttccttaaacgcaaaagtaagaaaacggcaccgccgttcttcttccgagcgccgcagaaacatttttaaatatttaattgttgttcattttgatggcagtgtaagcaggtagtagggcataggtccctgtgaatccacaagcgatatgaatgagagtctatgccctattaccattgaacagaagcaaaatgaacaacaagtaaggagttataaatgatccaagaagcattatataaagtaacacatggtcaagatttatcttatgaccttgcaaaggatacaatgaacaagattatgagcggagatgtagccgaagtccctatggctggtttcttatgtgctctagcagcgaaaggccctactgtagatgaggttacagcttttgctgaggttatgcgtgaaaaggctggttctgttccgcacgagcaaacagtagttgaaattgtaggtactggcggtgacgaagcgaatacgttcaatatttctactacatctggttttatcatttctgcagcaggtattcctgtagcaaaacatggtaaccgcagtgtatctagtaaatgtggtgctgctgacttgattgaagcattaggcgctaagttagagcttaatggtgaacaaaatgaggcagtcctcaaccaagccaatatgtgcttcatgtttgctcctgtataccatcaagctatgaaatatgcaggccctgtacgcaaagcgttaggcgttcgtactgtattcaacatccttggaccattggcgaaccccgcaggcgctacggttgagttgatgggcgtttacgataaatccttggtggagccattggctcatgtattggctaacctcggtgtgaaacgcggtgctgtggtacacggcttcgatggccttgatgaaattacggctaccaacaaaacgtacgtatgcgaaattaataatggtactttcacaagctacgaattcgatcctaaggactatggcttcgaatacactgataaaactgagcttgaaggtggcgacgcaacagtaaatgctgagattactcgccgcgttctcggtggtgagcaaggcggcaaacgcacggcagttcttctcaacgctggtatggcgatttatcttgcaaaagatggcattactttagcagagggtattaaagaggcaaaatatatgatcgattctggcaaggctcttgctacaatggaacaatttgtgaaagcaacacaagaggtataaccattgattttagatacaattgtagaggctaccaaaattcgggtagccaaagaaaaacaggtggaatcacctgaggctgtaaaagcagcggcgttggcgttaccatctgatacaggatttccttttgaagcagcccttcgtcagcaagactttaacttcatttgcgaagtaaagaaggcatctccgtctaagggaattattgctgagcactttccctatttagacattgccaaagaatatgaagtggctggtgctgcggctatctctgttttgacggagccagacttctttaaaggtgataaaaaatatttgcaagaaattgcaagcactgtcaaaatccctgtacttcgtaaggacttcatcatcgatgagtaccaaatctaccaagcaaaagtgtggggcgctagtgcgattctcctaatctgtgcatgtttagatgtgcctacgttgaccaagttccgtgagttagcggactctcttggcttatcctccttggttgaggctcatgacgaaaacgaagtacaaatggctatcgattgtggggcacgcattattggcgttaacaaccgcaatttgaaagactttactgtagacgtacaaaacagtgtgcgcttgcgtaatctcgttcaagacgatgtgatctttgtatctgaaagcggtctagaaacgccagaggatatccaagtattgcgggataacaatatcggtgtagccttgatgggggaaacctttatgcgttctcctaacaaggtggaaaaattggcttacctttatggcccaacctattacacaccaaaggttaagatgtgtggcatctctaaagtagaaacaattccggctattgtagacgcaaagccagactacatgggccttgtatttgcaccgagcaaacgacaagtcacagtggagcaagctaaaatattgattgaagaactacataagcaatgtataaatcactatgacataaaggtagttaaaacagtaggcgtttttgttaatgaaacattagataatcttgttcgtattgccgatacagcgaatcttgatgctgtgcaattgcatggcgatgaagatgaagctttcatccaatccttaaaagaacgtactaatgtagaggtttggaaagcgattcaaatccgcactgctgcagatacagaaaaatggattgatagcagtgcagagatgcttctctttgatgcatatcataaagatgagaggggcggtacaggagaagtattcgactggtcctctttagatgcgtttgaacgtccattcatgctagctggaggtatcgacagtacaaatgtagctcgtgctattcggacggttcgcccatatggtattgatattagcagtggcattgaaacaaatggtatgaaggatgataagaagattacagctttcaccaagattgtgaagagtataggaaggtaagttatatgagtgaacaaagacatggctattttggcgccttcggtggtcaatttatgccagagacattgatgaatgcagtcatcgaattggaagaagcgtacaataagtacaaagatgatccagagttcgtgcgcgaacttgaggatttacataaaacatatacaggtcgtccatcccttttgtattatgcagaccgcatgacaaaagatcttggtggtgccaaaatttatctgaaacgcgaagatttaaaccatactggttctcacaaattgaataacgtaattggccaaatgctattggcaaaacggatgggtaaaacacgggtaatcgctgaaactggggctggtcaacacggtgtagcaacagctacggtagccgcattgatgggcatggaatgtgaagtattcatgggtgctgaggactgtgaacgtcaagcactcaacgtatatcgcatggaattgttgggcgcaaaggtacatcctgtaacaacaggtactagcacattgaaagatgctgtatccgaagcgatgcgcgaatggacaaatcgtatgtccgatacacactatgtgttgggctccgttatgggcgcgcatccattccctatgattgttcgcgatttccaatccatcatcagccgtgaagcgcgtgaacaaattctcgaagcggaaggtaagttgccaacagctgttatggcctgtgttggtggcggctccaatgcgatggggatgttctataacttcattcctgatgaaggtgtacgcctcattggttgtgaagcagctggtcacggcgtagatacagatatgaatgctgctacgatggcaaatggtacagtaggtatcttccatggcatgaaatcctacttctgccaagatgaagatggtcaaatcgcaccggtatattccatttctgcaggccttgattatcctggcatcggacctgaacatgcgtacttgcgcgacagtggccgtgctgaatacgtacctgttacagatgatgaagcagtagatgcgtttgaatatctatcccgcttagaaggaattattcctgctattgaaagtgctcatgcggtggcacatgcacgtaaaattgctcctaccatgagtaaggacgatattattattatttgtttatctggtcgtggcgataaggacgttgcggctatggcgaaatacagaggggtggatcttcatgagtaaaattaaagacgctttcacaaagggcaaggcattcatcccatttattagtgctggtgatcatggtattaagaatacagaacggtatattcgcgtcatggtgaaagctggtgctgatatggtggaaatcggtattccgttctcggacccgacagcggaaggcccagttatccaagaggccagcacacgtgcattgtctacaggtgtaaaaattcacgatatcttcgatatggtgcgtcgtttacgtactggtgatgatgcggtgacagtgccactcgtattcatgacctatttgaatcctatctatgtattcggtcgtgaaaaattctttaccctctgtgaagaggttggcatttctggagttattgtgccggatatgccatttgaagaaaaaggtgaacttggaacaattgctcataagcatggtgttgaagtagtatccttgattgccccaacatctgaaaatcgcatcgaaatgatcgcaaaagaagcggaaggtttcgtgtattgtgtatcgtccttgggcgttaccggtatgcgtagcgaaatcaagacggatattaaatccatcgttgaaaccattcgtaaatacacagatattcctgtagccgttggcttcggtatttccaaacctgaacaagcagaagctatggcgcgtgtatccgatggtgctatcgtaggttccgctattgttaaaatcattgctgaacatggggaaaatgcagatcaagcattgtttgattacgtacaatctatgaaacaagccgttttaaaggctggtgcataatatagttgccctgtcgtttgagaaaaaggatgtttaatgatacgacaattagtaattgatacaataaaagataatattatagatcggtattgtgatttttctggcaccatttctcggggcgcattttggcgatttatgcttgttgaacatttgattgttggtgtttgcttcgccgtgctaggtttactgtccctgtatagtgccctatttatatatacaataggcatagtttttgcgctgtggtttatttcgattatggcccttacattgcctaatttgggtgctatggtacgtcgcttacatgatacaaataatagcgaatggctattgctattagggtttattccctatataggcattctaatcgttatcgtattattgctgcgaggtacaaagaaacatcctattattgaaagctcagttgaatcctttgaagaaatagatttatttagcgataacgcggtggataatccacaaaacctaggtatattaagcaatgcatctcatacatcatatgggaaaataagtattattgctgctgtttttcttactattgttagttgggggattgggatatatagtttttcctctgctgcagataaggaaatcgatgcgtatttacagatgcaacctggtgcgtttatgattatggcacaaaagacattaggtagtagtacagctgttgaatctgctaaacaggttgtaataaattattatacatatcttaataaggaacaatatcaagaggcatatcgtttattggctcatcgagaacgtgaaaaatatggcacctatgatcaatgggttaaatctgttaaagctactcataatcgtcaaatgtcttcgctccgtttacaagctgtgttgagagatgatgacgatgtagatcatatttccttcgagctgactttcacagataaagcctatcctaatcaaatgtttgtcaagatgatatatgagcatgatacgtggcgtattgagtcgattgtgccgtacgatcaaaaatatgaagagcgataaggagggcctatgaatcagaatatgatatatgatgtaagttatatggatgcccttaaacgtggattcaagcaatatgttaccttttctggtcgtgctagccgcagtgagttttggcgttttatggtgtgccgagaaattattttagatgggctagctggtttcggtcttatcgtagatatggtgctcggcaatacatcggctgctagtgattatgcaatggtgctgctcgtcatattacagctcgtattttttctacccagtcttgctattacctgtcgtcgattgcatgatgttggaaagagcggattaacatttcttttagtatttattcctattgttggtatctttgtgctcttatctaatcttgtgaaaaaaggtgacgtatccatgaatgtgtatgggggaaaaacagggtatacctgtgttacacctgttatggagcaacagttaggcctagagcatacgcctactgtaagagaagatattttgatgggtgcggtagctattattttatacgtttggatttttacccagcagtttgttgaaagcgcatgggtatcctttaatgctagaggcatattctagtcaaacctcgttttaccatttggtaagacgaggttctttttatatgaaaattttatgaaagtttaaatgtggatttattgactatattgaaaaatattgtaaaatgaataatagatgaaactaaataattcgaattagataataatgtatgtaaatcatattgtagaaagaggttcggcatgcgtgcttgtccaaaatgtggacaaagaatacctagttcagagcgttattgcccgtattgtgggcatatgaaaaatattccattaccacttgatgcctatgaattgggttttatagaaaattttaaacactgtgtagttcataaatacgcgaattttgaggggcgtgctagtcgcagtgaatactggcattttatgcttgtgtatcaattaattatagccattatattgtttatatgcgctgctattagttgtgtaacacctgtatcgggaacaacgggggttgccttagggctagtagttctttttattttgtcgattggatttatcataccaggtgtagccgttgctgttcgacgtttacatgatcttggttggtctgggtggcctgttctattgggactcattccttttgtcgggattccggcagtattaatattaatggccttgcctggaaagaccgcggctaaccggtttggaaatccaacaggggtagaagtcattacaaagcaaatggcacataaatatggatttattgatgcgacgccatctacaccattgactatagtacttatagtggtgttagttgtactatggttactagtggattggatgttagcaaattgaatatatgtatagagcatcaggattaaaatagaaggtctgtgaaaatgagcaaaattgcattttcacagacctttattgtatgtaaactaaaagttatgacaactcattcaaaatacatatgactcaatagacgtattcagctatatgacaagcctttttaattgactaagcacagcgtactttttataatagatatattataatactatagtttcgtagtgggattattatttcctagttaaatacaggaattatattatctacagttgtagtttgcagatagaaacatatcttatcagatatataaggagacaatacgatgaagtttaatacaaaatgtgttcacggtagtggcaaaccagatagtacaggggccatctctccagccatttatatgtccagtacatttacacatcctggtttgggtgaaacaacaggatttcaatatacacgtgagtctaacccaactcgtgatcgccttgaaacattaattgcaggccttgaagaaggtactgatgcaatcgctttttcttcggggatggctgctgttgatgcagtattccatttgttttcccctggagatcatgttattttaggggatgatttgtatggtggatccattcgattatttactaatatctacgaaaagaatggtgtcgaatttacctatgtaggtacatctgatcttgatgcagtgcaagcagcttttaaaccaaacactaaagctgtgtacattgaaacgcctacaaatccgatgatggaaattaccgatgtacgtgcgttgagtaaaatggcacatgatcgtaatgcacttgttattgtagataatacatttttaagcccttatttccaaaaaccattacatcttggtgcagatattgttgtccatagtgggactaaatttatcggtggtcatcatgatgtaatttctggatttaccattgtaaaagatgatgaattggcagctcaattgcgccttatttataagacagtaggcgcgtgtttatctgcctttgatagctggcttgtcattcgtggcatcaaaactttggcgctccgtatggaacagcatcaaaagaatgccattgctctcgcagaatggttgaaacaagaaccgaaggtaacaaaggtattattccctggacttccagaacatccaggctatgaagtgaacaaatctcaaactactggctttggcggtatgttgtcctttgaagtagatagtgaagagaccgctaaacaagtgttagaaggtattcaattgattcaatttgctgaaagtttaggcggcaccgaatccttgttgacatatcctgttacacaaacacatccagatttaaaacctgaagatgcggaacgcaaagggattacacgtcgattgttgcgcttgtccgttggcattgaagatacagatgatttgattgctgatttagcacaagctttcaataaataaaaggaggctattatgggccgatataattttgacaaaatcgtagatcgcaagcatacaaagtctctaaaatatgattttgctgcacaacgtggtaaacctgctgatgtattaccattttgggtagcggatatggattttgaaattcctagtgaattaaagcaagtcttgttagatcgcgttaatcatggtatttttggatatacggaatctgatgatgcatatttcaatgtactaaaagaatggtttgctagccgttttaattggaatatagataaaaaatggctcgtaaaaactccgggcgttgtatttgcacttgctatggcagtgcgtgctttcacaaaggaaggggaaggcgtactcattaatcaacctgtatattatccattcagcatggtcatcgatgataatgatcgtaatttgattaacgttcctttgattcaaggggcagatacatatacaatcgattttgaaggcgtagaacgcgctattgttgagcataatgtaacattattcttgctttgtaatccgcataatcctgtgggccgcgtgtggagcgaagatgagttaaaacgtcttggtgatatttgtattaaacataatgttattattattagcgatgaaattcacgcggatttcgtatgggatggtcacaagcatactgtttttgctaatcttggtgaaagctatgcggagcattgcatcgtttgtacagcacctagtaagtcctttaatattgcaggtttacaagtatctaatattttcatccctaatgattccttgcgtcgtagatttgtcaaagaaatcgaccgtgcaggctatagtcaattgaacacgatgggacttgtaggttgccaaggtgcttatgaagtgggtggaccatggcttgatgaattaaagggatacattcaagggaatattcaatatacccttgattattttaaggaacatttgccaaagcttcacatgtatcgacctgagggtacgtatctcatgtggtttgattgctctgaactgccattgacaccagaagaacgtgaacggtggctacttaatgatgcaaagctatggctggatagtggctccatgtttggtaaagatggtgaaaagtttgaacgcatcaatgttgcctgtcctcgtgcaatattgacagaaggtttagaggcattgcgtcgcgcttatgtcgctaaagggttttaggaggtttcacaatgccgattaaagttattaagaatttaccggctataacaaagttagcacaagagaatatctttgtaatggatacggaacgagcggaaacacaacaaattcgtccgcttcatattttgcttatcaatttgatgcctacaaaagaggttacggaaacacaaatccttcgcgctcttagtaatagcccattgcaagtaaacttaactttattgcatacagcatctcgaaaatctaagaatgtagatgaagaatatttagagactttttaccgtacctttgacgaagttaaagatgagtgttttgatggcttgattattaccggtgctcctgtagagttgatgccttttgaagaggttgactattgggatgagcttgtagaaattatggattggagtgaagaacacgtatgctccacgttctatatttgttggggcgcacaggctggcctgtaccatcatttcggcattaataaacaaattatggatactaaattgttcggcgtttatgaacatgatatctataacgaccaaccggttctcttacgaggttttgatgaaaagttctggatgccgcactcccgccatactacagtttcattagagcaaattaaagcacatagggaattagaattgttagctggttctgaaccaactggggctgccatcgtacgaagcttagataataaacacatctttgtttttggtcactccgagtacgattgggatacactcaatcgcgaatatgtacgagaccttgctaaaggtgaagacattgcggtaccagaaaactatttccctgatgatgatccaaaacaaaaaccaatcgtaagatggcgttccgtaagcacattgctatttacgaattggttgaactattacgtataccaagaaacaccatatattattgaacaaattcagaaaatgaagtttgaacgagataaaaattttggtgcttatatttaaatgcagagtatgtaagtgaaccgaatgtgttcccaaagactccaccggccgggtctgactccggcctacggcctacgcagggccaaagtcgtctttggaaacgcattcggttctttccatatcagctataattttaagatgcacccaaattttagtagagcccgaagtcgttttgagaactggtaggttcttctcatctcgaactttaagttgaaggcacccaaattttggcgccctttgaatatgttatatatgaagaaaaccaaatcggtttccaagggcgactttggccctgcggaggccgcaggccggagtcagacccggccggtggagccattgggaattgatttggtttaccggtacatagataggcaccaaaatttttgctatagcttatagttatggagaatgtattataaaaagtggtagacatattttttaatacatagtaatataataggcataagaaatgaagtttattcctttagatgaatgggagttgaatttaatgagcaaacaatataaatttgaaacattacaattacatgcaggtcataccgtggatccaacaggttcccgtgcagtacctatttaccaaacgacatctttcgtatttaaagatgcagaggaagcagctggccgttttgctttgactaatcctggtggtatttattctcgtcttggcaatcctactactgacgtattggatgcgcgtgtagctcaacttgaaggtggtgctggtggtattgctgtagcatctggttctgcagcgattacatactccattttgaatgtagcaagcgcaggtgataatattgttgctgcatctacattgtatggtggtacatataacttattcactgctacattgcctcgtttgggtatcgaaactaaattcgttaatcctgacaatttggaagagtttgaagcagctattgatgacaacacaaaagctgtatatatcgaaactatcggtaatcctggcattaaccttatcgatgttcaagcagtagctgatattgcacataaacataatattatcttaatcgtagataatacattcgcatccccatacttgttccgtccattagaacatggtgcagacgtagtcgttcactctgctactaaatatcttggtggtcatggtacaacattggctggtgtagttgtagaatctggtaaattcgactataaagcatctggtaaatatcctagctttgctgaaggggacgaacactacaacggtctagtatatggtgacttaccaattcctttcaccgtaaaaattcgtgctcaattgcttcgcgatacaggcgcatgcattacgcctttagcagcatggcaaatcttgcaaggtatcgaaacattgtccttgcgtgtagaacgtcacgtagaaaatgctcgtaaagtagttgatttcttgagcaaacatcctaaagttgcttgggttaactatccagaacttgcagatagcaaatacaaaccattagctgacaaatacttccctaaaggggtaggtgccgtatttacattcggtgtaaaaggtggcaaagaagcaggcattaaattggttgatgcattgcaaatcttctccaaccttgctaatgtggcggatgctaaatctcttgttattcaccctgcatctacaacacatgctcaacttaatgaagaacaacaaaaatctgctggtgttacaccagatatgattcgcctatctgttggtcttgaaaacattgatgacattatcgatgatctttcccaagcattggataaagcttaatccttaacttctcaactccttaaagcataactccaaaaacctatagaacataaaaagaaaaccttgtaataagaggctgtaccaagatgtcgtgacataatttggtacagcctttttgtcctataacccaaagaaaaagaccttgaattcaacgattcaaggtcttttaatatgtgtatatgtgtgtttaaaagggtttgttttatgtgtgtatagtttttatgagtgtttagttttatgagtgtgttaagaaattggagagatatattatatagtggttaggtgtatctatataatatatgggttatgcttagtattttgtagtttttactttagcactgagaactttaccggaaatagcatcgatcttaacgtctgcttttttgtcgccgccgttagtcatatctagtttgtagacaagtttattgccttccatttccaattcccattccattgtttggaaatcgctgcctacgcgttcgatagctcttgtttcagcagattctggtgtgatggagttttgtggattaaagctgtgagatttctttaatttgttccatgcactaatggattttgcttgattggaaacaacttgacctgttgcttcatcgattttcatttccactttttgtgtcttagtatatgcttctacttcgtaagttggatgatgttttgcatcataggagatagaagttaccattgcatctggatagtagcgatgtaatgtagtaacagcgcctacgtagtcgatttcgctactttgcattggagatgctacgctaccaacaccattccaggaactaggagctgggtaagcaggagctgcagatgctacgcctgcaatcaatacagtacttacgccaagagcacataatactttagacaaattatttacttttttcatgttaattacctccataaaaggattttgctcaaaagcaattgtgcaagtagattttactcaatctacttatacataatttaatatcataaaatgaatataaaatgaaaaactaaaactatatacttatttttaggtatatacataatatattcgacatacattatgtatatcctctttttttatttgcatattttgcataatgtaaacttaatataagtatatatggttgacataaataaaatggaatggtttaataaccttgaatagatatgtagtttgtttagataggtttcttttattctattaatggaggtataccatgagttccatttccaatcgacgtctcagcacaagagagttgacaatgacagccttatttgtaacattaattacagccggtgcatttattcgtgtgccacttccaaactgtccatttacactgcagattttatttactacactggctggtattatattaggcagccgcctcggtgccattagtgtagggatctatattatattgggacttatcggtgtacctgtgtttacatctggcggcgggccaggctatgtattgcaacctacattcggctatttgattggatttatggttggcgcttatgtagtgggtcgctttagcgagctttcaccaacacattctgttaaaacattgctcattggtgctattatcaatcttctcattgtatatggttttggcatgatctatttatatatgataatgaatgtatatttagggacacctattggttggtgggctgttatttggtcttgtttcttgattcctgttgggcctgacgtatttttatgtgctgtagctgctgtgatggggaaacgtattataggccatttgcgataatatatacaaaatagtaatagagggctatcacatttgtggtagcccttttactatgctatggatatacatatcctaaaatttcttgtgcatcttttgttttgttgatttctatgtatggttgcttgcgcccgtgaaagtctcgtgtggctacagtgccttctatggttacccattgtttattgctataagaatccccatcattcttatgcattgttagaccaataggggcgacgtctgcaatacagcaagccatggccatacgtgaaagtgtaaactcattggattttaatgtattgtcttctcggttaacataacctgtcatatagattttgtaccctacatattcctctggtttagaaccgagtgcaacgatggtgcgataatagttatccgagtttaatacgatttcctttttagattttgaaatgccaggatctttggcctcattattgattgtaataacttcgccaatatcgtcttgagaaaaattaaaatcattagtatcttctgtggcggccgtatttccagttacttgtacagaattaggcgataaaattggtggaaccacaaataacacaagaggaattatgattggtgtaatagagcgccaattatgtttatattgtttatttggggaccaaaggattgaaataatgcctcccaataacagtgctatacctgctaagagtaaaaataattcatatcgaggagccacatataatttatattggcccgtaatgagtagatataaaaaactaatacctaatgccgtatatagcagacccttgatgacactgagtatatctttgtttcgtagttctgataacatagtctgttctccttatacattaaataaaaattgaaatagcaatgtcatgatatacgtaataatactaatagtaataactaaacgaagtataaatgatgttgagatatactgacgtaacatatatacgtttttgatgtcaatcataggacctaaccataggaaaccaagaactgctgatataggaaataaattgcttaacgaacggcctataatggcatctgatgtagaacatagggagaagaggaaagctaaagctagtaataatgcattagcaataggtgtggctacatcgagtgaaccagaaaagaaggtaggttttatccatacttggaatagggctaatgtgaaagctgctgcagagaagtaaataagtaattgactgaattcacgctctacgtgcaatagaaagattttctttttattgccttcttgatttgttgaaccatactgataatcttttggctgaggtaaattgttagtgatggtagataatttgtgtggtttccatttaaatgtgagggccaccatacatgcgattaatataccaccaattatgcgagctagtattatttgtggcgtctctggaaatgcataataggttgctaataatgcgatggggttcataataggacttgcgagcataaacaataatcctatatgttgagggataccacgctttaataatgcattaaacataggaatagtagcacaatcgcagataggtaatacaagaccgctaccaatggcgatgccatagcttttaatagagtctgctttcagataacgcattagccaacgatcaggtaccaatagtgtgatagcagaagaaatgatggttcctaacaataaaaacggtatcccttcaaaaatgatgcctgatgcaatggccaaaacttgatggatggaataggaaatgctatgacggaatacagtgaccagtaatatatataatgtcaatatagccacaataccgtacaacgaccatggccatatcggtttagttagtttattgtggatgtcttttgtagtgggattgactaatatggaacattccggattgtaggattgtaagagtttctttactgctttggtttgtgtcgtatcattcgcatataacataatataatcggcgctgtatagttgcgatacaactctatcccctagtgcctgtatcatagatgttatactgttgctgtttgctgtgtagatgacgcgttctagatgacagaattcttttagaattgaattgaagaagatgcgttctaattgttgaaatgaaaacatgccattccattcaacccatatttctttcggcgttgtcgtagaaagataatcctgtatctgttgtactacatgatgtagattttcttctatatcatctggctcaatcgataaaggcttttttataaactctgtattacctgtttcaaagctgataatttctgtagagcccagtttctttcgttctcgtagctctacattgattagggaggttttaccagagcctaataagcccattacgatatatacaggaatcatgatgcactacacactttctcctgtatggatgaaatgtctatatcggtgccaataacaactaggtggtagtcctttaagtgcgtatctgtaagagaacaggattggagggtgtattgtaattccataggtcctgaagaggtaggaacgatacctttaacacgtagtactgtagacggtaatttattacaaaaatcaatccattgcgtatgagtgagggtttgtagattatggaatgtatagctcacaaaaggttggtgctcatgatggtggccgtcatggctatgatgactgtgattgttgtggtgagcaccgttgtaatcctcactgtcgttacatgtatggcaactgcaggtttcggaatcatgttcatgtgccttatgagtattagattttagttggtgtatatcctgttgaagtgcatctacatcggtataaattggtgtatgtggtgctaattcaacgatgagttgttttgctttttcaacctgtttttcatcctctatgtgagtaagtagaatagcataacagtgttttatttggtctttaaagaagggaccaaagttcttaattgccataggtgcctgcatagcatctacgattgtaataatcatgctgatataggctttactggtgatatcgtcatcgtcacaagtatataaaatttcacttaatttgctcaccccagatggctctatatagatttgatcgatatcttgcgtagatagaatatcgattagggcatttttaaagttgccttggagactgcagcaaatacaaccggatgttacttcacgtacagttgcgcccgatgcggataattgctttgcatcgagactggtttcaccaaaatcattttctataattaatatacgttcattagtgttacgacagtttaatatatgttgtagatacgttgtttttccggctcctaagaatccggatatgatcgtaattggtatcataatacgcctcccttgtaaatgtaaacatagtatactactcttacataacatataaaaatacccataagggtataaacaatagtttacaaagttaagtaataagcgagttataagaaaaattgataatattatactaatatgagtatatgtgaacatgtttatatatttataacgttgattttacaaaaaagcgtatgcctcataggatatatatgagtacatacgcttatttgaataaatattattatgtaaaactttgaaaaattattgtaatttttctagtaatgctttaaggaatacatatacatgttctacagaaggtagatgtacgcgttccgtatttgtatgtgggctaatgattgttggaccaaagctgatcatttcagtatttggtaaaacattctttaataagccacattctaggcctgcatggactgcattcacgcgggcaggggtgtcggacatagtattgtaaagtgcgataacttgttcttctagtttagagcctttatcgtattcccatgcaggatagccaccgctgcgggtagcagaaacgcctaatgtatcagcaaggagtaataattttttagttaagtattctaagctgtttttattagagctacgaactgatacgaggatgtctatcgtatgtgtgccttcagaaacaatagcgagattatctgatgtttctacaagcccttcgatggtttggctcatagagtgaaccccatcttctgcaagatagaggtaggatattaaggcttctgccgtatcatcagcatacactgttgccggtgtaggaatttcttccactacgaatgttaaatcaggatctttgatcgcaaattcatgtttgtattctttttcgtagaatttgataagggtcttaatcgcttctatatcctcgttgcgtacagacatggttgcaaccgctttagatggaatcgcattatgtttaacgccacctacgaaagaagctagattaaaggaatattgtttttctaaatcataaagaacgcgagcaagtacttggtttgcattagctcgttgttcaatgatttcgataccggaatgaccaccctttaaaccttttacagttagtgaaagccctgcatcataaccaggtagattattttcgcgcaatagtgggatggatacattaacgtggcagccgccagcgcagctcacgcagaactcatgttccacttcagtgtctaagttgattagatagtcacctgttacttgaccttcttttaccgctgcagcaccatccatacctgtttcttcgttagttgtgaacaatacttgtagtggaccatgttgttgattcttatcttctaggactgctaaaatcatagcgccgcccatgccattatctgcacccaatgtagtgtcatcggcgtgcatccattcgccttcgatgatgttggcgattggatcttttgtaaaatcatggttggaatcatgaccttttacgcataccatatcgatatgaccttgaaggatgacggatggacgattttcatagcctggtgtagctggttttttgatgactacattccattcgctatcttgtgtagcttcgagacctaaattgtgagcaaaattgacaatgtaatcgctaatgcccttttcattgccagatccacgtgggatttggctcatttctttaaatatttctaatacgcgttttgcttgaacgattgcgtccatttggcacctctcattctgaaaatatatcccatataattctaattatcttagttgctatgagattattcatgtttattcattagttaataagtaattattatctataatatagttatatcacatgtactatgaatagaaaagacgatgtatatagtttataatagtatcatgcgtaatgtataacgaacgcgctgtattatataccttttatttatataggatggtgaaagtatgcaacatgaacgtcgcaacattagtatgcttatggatctctatgagatgaccatggctcatgggtactttacgaaacaagacaatacagaccgcgttgccttcgacgtattttaccgtcgcaatccggacaaaggtggatttgctatctttggcggattggaacaagttttagaatacattttgaatcttcatttcgatgaggaggatatggcgtattttaaatcattgcatttatttagtgatgaatttttagagtatttgcgcaacttcaaatttaccggtgatgtatatgccttcaaagaaggtaccatcatatatcctaatgagccgattatgaccatcgtagcacctcttatcgacgcacaaattgtggaaacagcagtgcttaccatgattaatcatcaatcgcttattgctacaaaggcgaaccgcatcgtgcgcgccgctgatgggcgcattgtatccgattttggggctcgtcgcgctcacaatgtagatgctgctgtatatggtgcgcgggcggctttcataggcggtgtcaatgggactgccacagttctagcgggacaacaatttggaattcccgtaaatggtaccatggcacatagttgggttatgtaccacgattctgaatatgaagcattcaagtcctatgctgaagtgtatccggacagcgctgtgttcttggtggatacctataatgtattagaatcgggtgtaccaaatgctattaaggttgccaaggatattttggagccgaatggtcatcgattaaaaggcatccgcctcgattctggtgacttagcatatttagctaagcaagcgcgtcgtatgctcgatgatgcggggatgaacgattgtaaaatcatggcatctaatagccttgatgaatatacgatttcatccttattaaatcaaggtggccctattgatatctttggcgtaggggaacgattgattacgtcgaaaacggatcctgtattcggcgctgtatacaagattgcaggcgttgaaaaaggcggcgtatgggaaccgcgcattaagatttctgagtctgtggaaaagattaccaatcctggattgaaacaggtatatcgcgtttataatgcggatggtcgcgctattgctgaactattgacattacctggcgaagtgccatccacagataaaccatatcgttatattgatccagaaaaaccatggagagaattgtattatgaaaactgcacatttaaaaatatgcaggaactcatgattaaagggggcgagcaaatcgtaccatccccaacattggaatcgatacgcacctatgtacaagaacaattagctcatgagatttggccggaagaacagcgctttgaaaatccacatcgtcactatctagatatgagccctgactattatcatatgaagatggacttattgaatcgtattggtcgtaaaaaataggagggcctatgcttacacatccagaacgaacaaaggaggaattagtggcgtggattcgggactattttgaacaaaatggacctgcatgttccgctgtagtcggcatttcgggcggtaaggattctagcgtggtagccgctctttgtaaggaggcgcttggtgcagaacgcgttgtaggcgtccttatgccaaatgatgtacaatccgatatagatgatgcaaaagaggtggtggcgcatcttggtattccctatatgattgtaaatattggtaatgcctatcgtgcattaacggaggctattgtacaaggcgagggtttttccaatgtaacgggccgtacagatttagcgcgagatgcagaaatcaatacaccgcctcgtttgcggatggccacattatatgcggtaggtcaaaatttgccacatggtgcacgtgttgctaatacatgtaatggctctgaagactatgtgggctactctaccaagtttggcgatgcagcaggtgactttagtccattggcgaatctcgtggttgaagaggtacgtcaaattggacgacttttggatattccgcgtcatttagtagacaaaacgcctagtgatgggctcagtggtcaatctgatgaggataaactaggatttacctatgccgttctcgatcgatatattcgaaccggcgaaattgaagatatacaaacgaaggaacgcattgattatctacaacgaattaatcggcataaacttgaattaatgccttcctttaaaccttctacattatgatacctataggaggataagatgactaagaaaattgcaatcattggtactggtggtaccattgcgggacaaggtgcttcggatactgatttgacggggtatacagcaggtgtattgcccttagaagaaattatatcctctgtacctggcgttagagattatggaccttttgtgtgcaatcaattttgtaatattgaaagttcagatataacgctatttcaatgggtccgtctatcaaaattagtacaaaaatgtgtggataatgatgatattgcgggtgttgttattacacatggcacggatagtatggaggaaaccgcgtactttttgcatcttactgtccatactgataagcctatcgttataactggttcgatgcgtccagcaggagctgtcagtgccgatggccctattaatctattgcaagctatacaagtggctcgaacaccagaatcatataataagggcgtactggtagttatgaatggctatattgatggtgctcgtgatgtaacgaaaatgaatacaactaacgtggcaacctttggtagccctaatgcaggtcatcttggtattgtacaagatggtatagcccaatactatatgtgtccgttgcgtaagcatacgatggaatctgagtttggcttgccagagaacgatgacttaccacgtgttgaaatcttaacctgttatgcaggtatcgaagaaattatggggcttgccatagtggcaacgaacccatcgggtttgatcttagctggcttaggccatggtacgataccgcaacctatccgcaaggtaacatccaatttaccaatacctgttgtacgcgcatccagaacgggaagtggtatagtatctaaggttccccaagatgtggaggcaggctattttgtatgtgatagcttatcacctcaaaaggctcgtatcttgttgatgttggccttacaaaaggaacgcacttgcaaggatttggaacgaatctttaaagaatactaacccttacaagcaattgtatgcggatgagacagatataaaaagaccctttgtgattattcacaaagggccttttgcttgtataaatcattcggtaccgatggcattttctaatgctcgttgtacacctaggtatacagctttggctaaggtgtcgccgaatagagaataggatcctgcatcagttaatacatcgccatttgtattgatagttaagatgatgccatctgtagcagttccagtagcggaggtattcgtttcttttgctaaactgtgaactatatgtgtattgtatttgggaaagtcctgggtactttccaccttccaatcttgtaatgctgctgttttagcctcagtaatcgtcatgatggctttcaccatcgcactatctgttaaggccttgttggtaaatacgaggatattaattgtgccaggagtgtggaattcaccatctttttcttcataacaataacctgtacctgcacgatgggccgttttcttataaccaccagtgacaatggtttcaacgattgtatcactttcttgtaccattgtgtacgcatgaagggatggtgtagcagaggttaacagtgcagtgctgaaatgtacaggcacatcgatatgctcaaattcttgagctaaatagtttgctacagagccacctggtagatctttttctgtttcaatatggtaggttaattgttgattgcgtacacctaatgtatggtgaaagcctccatttagttgaccgctgctcaaggaatagtgaatgtcgtcaaagagtacggttacagagttgtattctttagtgacatgaccgcccgttattaattcatctggcgctgtatatggattattagacatataggactccctagtttatcattgttagatatagaatataaagctataataaaaggtaatattttattatcttcatataagttgtttataatacataatatttacatgtgaaattatatcatatgtttaccatagatttgagtaagtcaccttaagcattgtgggggtatacatgtacgaattcttagcaaccgcatcagagctgttatttaaagatgccaatgtattgttaaaattaagagaatggttttttagccaagccggcaatattttgcttgctcttattatattttttgtaggccgctatattattcggtggattaaaaacgttgctgttcgtgttatgacacgggccaactatgatactgccgcaatgggctttgtatctcaaattattaattatgtattgcttgtaggtttattattagtctgtcttaatcaagttggtgttcctacaacatcctttgtagcagctttcggtgcttttggtttaggtattggcttagcattacaaaataatctagcgaacttagcatcaggattattgattttaatattcaaaccatttcgtgctggacactatattgaggttggggacattatagggagcgttacatccatacagtttatgaatactattatcactacaaaggatcagaaacgggtgtacataccaaattcgattcttacatctcaatcagtaacgaattattcctatatgactgaacgaatgattccgtttgtttttgatattggctataacaatgatcatcatgaagcaattaagatattaaagaccgtttttgccaaggataaacgtattctaaatgctaaatatatggagattggtatttctgaatttggtgataactctgtgcgtatttctgcgtttgcagaagttaaaacgagtcagtttcttgatgttcgatatagtattatgtccgatgtaaaagatgcttttgataagcatggtatagatattccatatccacaacgtgttgtatatatacaaaacgcagatacttctacaggtgaaattaaaggaactaagaaaaaagtaactaccacgaatcaagaaatctgataaatcatgaatttacaagttaataatatgtagaaagagattgatatgagagatttaataatgtataggcacttagtatggcaacgttttatattggcgttagctttcataggtgccatgctcttaggtactgttgctcatggtgctgcacctacgccaccatctaccattggtgaagccgtggtactcattgatgcagataataaggagattttatttgccaagaatcccgataaatggatgcatccggcaagtactacgaaaatggtaaccttattaacagcacttgagttaaaaggaacacaattagatgagttagcaacgattagtccctatgcgacgagcatggaagaatctaatcttggcgtacaagtaggcgaccaaatcaccttggaaggtgttcttgaaggtatgatggtagcatctggtaatgatgcggccgtagtggtggcagagaacgtaagtgggtctgtagaaaattttgcgaaggatatgaatcgtatagctgctaaggcgggggccaaaaacagcgtattcctcaatcctcatggattgactcaaatgggtcatcattcgacggcacgagatttggctttgattgcagcttatgggatgaaatatcaaatgttccgcgacaaggttgctaatgattactataaggtgccttatcaaaaccgtgcgcctgaaacgattcgcactacaaaccattttatccggaataaatatcctggtgctaatggcttaaagaccggatttacaaatgcggctggtgaatgtttaatcgcatcggctacgcgaaatgggcacactatgattgtggtgatgctcaatgatgacaaccgttggaatgaggccgttcagttcctagactatggctttaaattacgcggtgccatttaatatcataactatttagttatacatactattaaaggtcctaccttctggtgggaccttcattgtaagggggatatgtatgagttcattttttgcttttttaaaacggatgcgctttattaaccgttggagcttgatgcgcaatacggaaacagaaaatattcaagaacacagccttgaggtagctatggtagcccataatttggcggctcttaaaaatgaatatttcggtggaaatttagatattaacaaggtggccgtcattgccatgtaccatgaggtgagtgaaatctttacaggggatatgccgacgcctattaaatactttgatcctaagcttcgttccttgtatggagaggtggaaaccttagcgcaagaaaaaatgttaagcacattgccagaacgattgcaatctgtttataaaccgtatattgtagatgctgaaacattgcctgaatggccgattgtgaaagctgccgataccttgtccgcctatatgaaatgcgttaatgaattacatgcgggcaatgatgaattcaaggaggcgcacgatacgattttggccaagttgaaagctctaaatatgccagaggtggacatgttcatcgaagaatatgtaccggccttgagtgaatccttggataaacttaattactacaaaatatagtatgtggtattaaggtttgttgatatattcctgattgcgtatcaatatttttttaccgcgccatgagaaggctcgatgcccatatttggctttgaattccttgtttgtcatcgattctaattcggcaatatccacatagggttcgatagattgaaattcaataataggtgttgtagataagtctttgttatggggacaaacctcttggcacacatcacaaccgaatactaagggtgatttcttgatgatggcttgttcgtcatcggtgagatcgccttttttttgcgttaaatagcttttacaggtggcgtaattaaattcattgccatttagacattgacctaagcaggatgtaatacaccgattacagcccatacacgtatcggtcataggtgtgttgggttcgaattctaatgtggtgagcacagtgccgatgacgatataagaaccccaagttggattgataaagcatttattttttccatagaacccaaggcctgctaaataggccatatatcgatcagctaagggactcgtatcgcaatggatagagaatgatgcatctggggcagtcgttttaagttcatctacgaggcgttgtaaatagtctgtcacaactagatggtaatcagtggcccacgtgtaacgggatagattcgtaggaccttcatgtggcacatgatagggaaatagacagacgatggcgctgtgtggcataaagtctgttgtgcctatcagtcgttcgtctatgtcggctgctgtgaatggacagggattggattcctgcaaaatttcacgggcctctatagggagtggccatgacgtggtgcctactacgggtatatgtaattgtttgcaaacttcttgtaattttatattgtttgtcatagatttacgatgtaatagttgttacaattatatatataagcaaaaataaaaggttttatggcaacattgctaatagtaaatggcttaagataatgattgtttttagtataccattgtgaggatagattatgttagcctttttgaaagtattacaaccgaagacggtggaagaggcctatgaaatggccgtgaaaaataagacggcaccgatgcttgctggtgggtgttggctacgcttgggtcgtcgtacatggcctgcagtaatcgatatggcaggactagatttacgatatgttcgtgaagaagataacgaatttgttattggcgctatggcgacacaaggcgatgtagaacgatttgaaccattacaacgcttttgtagcggtgctgtagtacgtggtgtcaaagaaattctaggcgtccaatttagaaatatggctaccatgggcggatccgtagctagcaaatttgggttctctgatattattcccgccttgttagctgttcatgcagacatcgtaacctataaaggtggtcgtatgtccatgaaggattatatgaattatcgggaacgcgatattttagttgaaattcgcatccctaaacgcgaagtgcctgttgcggttgaggcgttgcgcatttctcgtggtgactttccgtatttaaccggttctattcgccgtgatgatacaaattatgaagtctatatagggactcgtccaggtgcgccacaattggctgagaaagctagtgccttgctttcagaaaaaggattagatgcatttgatgaggcagcacagattgcatcagaggaattagtgtatcaaaaaaattctcatgcatccaaggaatatcgcattgagatggctaaagccatggttcgtcggttagttaaggaggtggcacaataatggaattagtattgaatattaataataagaatgtaatcgttaatgtgccaacggatgaaatgctattaactacgctgcgtaacttaggctattatagcgtacgctgtggctgtgatacgacaaactgtggtttatgtactgtttgggtcgacgatgaaatcacgctatcctgtgcatatcctacattccgtgcgcccggtcatacgattacgacccttgaaggtcttgaagcagaagcctcattattagcagattgtcttgcttctgaaggggctgaccaatgtggtttctgtactaccggtatgatgatgagcgctatcgcattgaagcgtagaaatcctaatgctagtgatgatgaaatccgagaatacttgattggcaatctctgtcgctgcaccggctatgagtcgcagctccgcggtgttcgtaagtatctacaaggaggtttataatgaagcacattggtaagtcttatgataaagtcgatgccaagggtatactcagtggtaaaccttcttatacaggggattttgtgccaaaagatgccctcattattaaggtattgcgtagtccacatgcacaggcgaaaattaaatctattgacacatctaaagctaaattaatccctggtgtagaggctatttttacctatgaagatgtaccgaatacgcgttttactttagcaggtcaaacctatccagagccatctgcctatgatgcattgattctcgattctgtagttcgctatgtaggtgatgaagtggccctcgtcgtggctaaagatgaagctactgcattgaaggcgatgcctctcattaaggttgaatacgaggtgcaaaaaccggtgcttgatttacgcacggctatggaccatgaaacagtagttcatccagaagatgatattctcaatcacattccagtaggacaagactataaacgcaatatttgtgtatcgtaccataagcgtgttggtgatattgaaggggaacttgctaaatgcgattatgtcgtagaaggcacatatttcgaccaagctacgcgtcaatctgcaatggaaccattccaaagctttggctatattgatcatttaggccgtattgtcatcgttagctctacgcaaatagtgttccatgtgcgtcgtcatattgcacgagcactaggaattcctgcatctaaaattcgcgttattaaacctcgcattggcggtggttttggatcgaaacaaacggcttgtaccgaattgatgacagcatttgtaacctggaaattacaaaagccatgttatttgctatatgatagaacagaagcgcaaacttgttctactacacgtcatgctcgtgaatggtatattcgcgtaggggctaccaaggatggcattatccaagttatcgatatggactccattaccgatgcaggcgctcatgcaacacactgctttacgacaaccacagcgggggaacataagtctgttccattgtataacaaggcaaaagcagtacactatggcaccgaaggggtttacatgaaccatacgccgggcggagccttccgtggttatggcgctacagaggctttgtggcctttagaatgtgcagtaaaccgtttggcggacgaaatgggaatcgacccagcggaacttcgtcaaaagaatctaattgctgccggtgaacgcagtttagtatatgatcctgatgaaatcatggattctggcctattccaagaaactgtaaataaggttaaggaaatggctcgttgggatgagcgtcctcatagttgggacattgatgagcgctatcgcggcggtttggggatggctcttgctttacaagggtccggtgttgctaatatcgatgtagcatccgtagaaattcgtcttggcgatgatggtaactacacattgtatacgggctcttccgatatggggatgggggctaatacaattcttacacaaatggcttgtgaagctcttggttgtccgatggaatctatgacggttgtcgaatctgatacggatatcgtaccatttgatccaggttcatacgcatcgagtacgacttatgtaacgggtacagctgcgaagatggcggctgaagaattgcgagaaaagataatcaataaattagcccaatttatgaatgttaaaccagaagatattgattttgatggcttagtaggtacgactaaggacggtacaaagaaaatgtccattcaagaattagcgcctaagctattagtcggaactacatccgaacaattaacggggttcgcaacatggggtagtcatacatcgccaccaccattcatggcttctatcgctgaagttaaggtagataaacaaacgggacaaattataccgttacatatgtataattgtgtagactgtggtaccgttgtgaatcctaaattagcgcgtgtacaggttgaaggcggcgcagtacaagccattggtatggctttgtatgaagatgttagatactctagtaatggtcgtttagaaactaataattttatgacctataaaattcctacacgtcaagatattggtgaattacatacagcctttgttgaatcatatgaggaaagtggtgcatatggtgttaaatccatcggtgaaattgttattaatacagcttgtcccgcaatacaacatgctgtaaaaaatgcagttggtgcggatattcgtacattacctatgacaccagagaaggtatttatggggatggacgagaaatataaagtataactatttctacattcctaaagggggcctcgtgctatgacatcacaaacgcagtactggaatcgtcttatccaacctggcattgtcgcattggttggggctggcggcaaaacaacggtcttatctaagctagtcgagtatggtcggttgcaaggacaacctatcgtagtgacgactacaacacagttgtatgaatcacaagtggctcaatatgaacctatttatacaaaggatatcaacgatgttgatgaatattgtacaaaacgtattcaacaaggttattgtggtgcctggtttaatggtattacacgaactaaggttgatgctgtagattgtgaaagcatagatggccttagtgcgttacatccaaactggcaaatcgttgttgaagcggatggagccaaagagaaatggcttaaggcaccaaaacatacggaacctgttatcccaagtcaaacaaagacgactataggggtggtgaaccttcaaatgctgggcgcatcccttgatgaagatcatgtacataatttagaattagttcaatccattgtacatcgcgaagaaggtgccattgtaacacctcatatgcttgctcaaatcgtgcttcataaacaagggctattccaatatagtaagggcaagaaaatcttgttctgcactggttatgacacggtacaacatcgtattattgatgatttcataagtcatgtggtagatagtgatatcacggccattgtgttggctgatgggtataaggctagttgtgaaattcgtcgtattattcaatgtcgctaggtagcaaaatggaatataagacaggtgaaagcgctcccttagggggcgccctttcacgagaaataccccatattggtgttgttttattagcagcaggtcagtcgcgacggatgggaaacaataaacaattactcccgtggcgcggaaagacgattcttgatgctgtatgtcatgcattacaaattggatggaaacgaactaatccttcatggtatttaaaaacctacccaatggttgccgttacaggtggggaccatgatattgaccatattgctagcagttatggattttctattattcataacgaatgttctgatttaggtcaaggcacatccatcgcattaggcgtgaaatacttgatgaatgaatttggcacacgagctttagatggtattatttgctctgtgtctgatcaaccgttactgaatccaatggttgttgaacaactcattactagctttcaacagcatagggatgaaacaaataggacaatcgtagtacctaaatatggaacaactcaacatcctggtaatccagttttatttggtgcacattggtttgaggacttgcaacacatcgagggtgatcaaggtggacgaacgatcattcgtggtgtggggcaaaattttgtagaatatgtaagtattattcctgaatggggatttgatatagatacgccagaggattataacgatttgcaacatcgtgaaagtgagggtgtatgaagcctttaatacttgtgcgcggaggcggcgatatcgcttccggtgcaatttatagattgagacgtgcagggtaccctgtagtagttaatgaaattgctatacctactatgattcgcagagaggtgagttatggtaatgctgttcattgcggtgaaatgattcttgaacggttggttgcacgtcatgtgtgtatcggtgaaattcaggatacgttatcacaaggtgtgattcctgttgtaacatcgtcctatgaagagttattagatcaactgcatccggatgttgttgtagatgccattttggctaaaaagaatgtaggaactactagactcgatgcaccctttgttattggtgtaggtcctggatttagcgctggccgcgatgtgaatgtagtcatcgaaactatgcgtggccataatttaggacgctgcatttatgatggtgaagcgcaaccgaatacgggtattcctggcaatgtgggtggttatacccatgaacgggtgattcattcgccaaaggcaggggtatttacagctaaacgtcatattggtgacgaggtgcaagctaacgaagtgattggttatgtcgatgaagaaccggtgcgagctaagattaccggtacgttacggggcattttaaaaacgggactcatcgtatctgatcattttaaattggctgatgtggatgctcgctgtgaggaatcgcattgttatagtatttctgacaaatccctcgctgttggtggcggtgttttagaggccgttacagcatgggactatgaaaggaataaagatggaaagcatttatgatattatgaaagaccgattacaggtgacggagccaacatttttggtgaccatcctatcggggcctcgtcaaggggatagaactatctataatcaggatggggatatattatatggtgacgctatagaaggctttacactaaatagagccaagccgaatgctttatgtgtatttggtagcactgaatgttttgttgaacctgttgaaaaggatccatctgtacttgtactgggggctggtcatgtaagccgtgccattacggatttattattatttatcggatgtcgtgctacggttgttgatgatcgacctgaatatgtggtgcctgaattctttgatgagcgtgtaacaagaaaatgtttgcctttagatgattttagagacaagttacctcttgatgaatataatggatttattatcgttacgagagcccatgaattcgataacacatgccttgaacaattgagagatcaactgcctacttatatgggtgttatgggcagtcaacaacgcattcattatgcattagaaaatttgaaagccaaaggttggacgcaagaggaactcgatatgatatatgctcctattggcctagatttaggggctcaaacaccagaggaaattgctttatctatcgtcagtgagtaccttgctgttgtacgaggtaaacaaggtcagtttttacgcagaaagagagttgtaagtcatgaatcgtgagtttgtagaatatttgagtcaacgcacagatgaaacactagcagtggcaacaattcttcatacggctggttctacgcctcgtaaagcaggtacttcgatggttgtattccctgatgggtctatttttggcactattggcggtggccgtgcagaaaatgaaatacgcctcagtgctattgattccatgaagaagaaggagcaacatcgacgtattgaagtaaaattaaatgatgatgtagccgtaaaagaaggcatggtctgcggtggatgcatggatgtgtggattaaaacgcaaaatgtataaccctgttttaaatttacagtgctcataaaatgagataaaatataaggtacagctaatgtaatggctgtaccttattattttgtataaggagttgcacatatgcattttgaagccctcatacatacctttagaatccttgatctcatcgatatcttgacggttgctatcggtatttactatatgtataaactcttaaaggatacacgcgctgtagccttgctaaaagggttattatttttggctattttgaatgttttaagccatgtaatgaatctgtatgttattaactggattctccaacaagggatgaccgttatcctctttgcgttacctgtcgtgttccaaccggaattacgtcgtgccctagagcaacttgggcgtggccgtatttttagtaaagcacagaatgtaaacgaagaagaaatggacatggctatcaatgaagtgatggctgctgcacgcgttatgtctcgtgaacatacaggggccctcatcgtatttgaacgcgaggtaggcttaaacgactttattgatacaggcattattgttgatgctgtacttagtcgagaattgattaaaaatattttcgttcctagtacacctcttcatgatggggctatgattatccgcaatggccgcattcaggctgcaggttgtctattgccgcttaccgaggaccgtacattgagtactgaacttggtacacgtcatcgcgcggctatcggtctgtctgaacaaacagatgcagttgtcgttgttgtcagcgaagaaacgggtgtcatctcttatacctatggcggacatatttatcgtcacttaccagaagatcaaattaaagaggcccttcgtacatttatggaaagacctcgtcaaaatattacgagcatgtggaaatggggtggcaagaaatgatgattcatttgaaacgcaactggcctgcaaaaatactttcattattggcagccatcgtcatgtggttttttattatgcgcgaccaaaatcctgtgatggaggtttcctatacggtgcctgtacaggtgcaaaatttggcagctaattacatcatagaggatgcacctcaatatgtacgcgttacgcttagtgggccacgcgatacgattattaatttgaagtctgaaaatcttaaggcctatatagatgcgtcaggggtttcgacgggacaaaataatgtaaccatccactttaatccaccatcggggatgagcatagttgaaatcaaacctgatacggtaacgattaatgttgatgaatatgcgtcaaagaaattacctgttgaaattgtgccaattggacaaattccggataatgtagcattaaaatcggttacagtcattccgaaggaagttaccgtatctggtcgcaaacaacaagtaatggctgccacacgagttgtcatgaaggttaatgtggccggtcaaactaaaaactttagtgctgttgctgatttagaagcttgggataatgcgggcaatgtgcttgatgtaaatattagcccaacacaaggccaagcacagtatgaattaaatttacttagaaaagataaagccgtacctatttcggcaataaccgtaggtcaagtagcggatggttatgaagtcaaaggtattacgattaagcctgtacaagtaacaattacaggccgtgaagaaatggtggattctgtttcggatcttaagacggaatctattgatataagtaatgctacggcacctattgatggtacctataatatagtaattcctgatggccttactagtaagatgactacggttcatgtaacagtggatatacaaagaaaagcatagatatgataagaataataaatcttcgcgtagccgttaccgtaaaggctacgattgaggaaatagtagaaaagaaataccctcaactaaaggggtatatacagaaaattcatgtggtgagacgtgccgtcgatgctcgtaagaaacctaatattgtatttgtgtataccctttttgtagaggctcaacatgaagaaaaaatcattaagaaactaggtaagcaaaaggatgttaccttatttacccctgaggatccagagccaattgtaattggtgacagacctctagtacatagacctgttgtgatgggctttggtcccgcaggtatgatggcagccttttacttagctcgtgaaggctatcgccctatcgtgttagaacggggacaagatgtagatactcgtgcgaaggatgtggaaacattttggaaaacgggatcctttaaacctgaatcgaatgttcaattcggtgaaggtggggccggtacattttctgatggtaaattgactacgcgcgtcacacatccgcggttgcatgaaatttcaaaatactttgtagaatttggggcaccggaagaaatcctgtacaagcataaacctcacgtaggaacagataaattgcgtcatatggtaaaagccatgcgtgagcgcattatcgaatggggcggcgaagtccgctttggagctaaggtaaccgatgtattcgttgaccaggatcatgtggtcggtatcgaggtgaatggtgcggaacgtattgatacgactttagttttatctggtgtaggtcatagtgcacgagatacgtatgaaatgttatttaaacgcggtatcgatatgatagctaaaccatttgctatcggtgttcgcattgaacatcctcaagatgtcatcgatcaatctcagtacggtgtggatccaaaaagcctaggtttaggtgctgctgagtattccttggtatatcatgataaggaatcggggcgtacggcctatagcttctgtatgtgtcctggtgggcaagtggtcgcatctgcgtccgaaccgggcggtgttgtaaccaatggtatgagcttgtatgcccgtgacagtggcgtggcaaatagtgctatcgtcgtaaacgtaggccctgatgattttggtacccatcctctagatggcgtggcatttcaacgagaatgggaacgcaaggcttataaattgggtggttcaaactttaatgcaccggctcaaacggtaggttctttcttaggccaggctgatgcgccgtctgttgaaagcagtatacatagttatgaacctcatatcgtagattgcgatttgcaccagtgtttacctgattatgtatcgtctgttttagaacgggccttaccgtattggggacgccgtatcaaaggctttgataaccctgaaatctgtatgaccggcgttgaaacgcgcacatcttctcctcttcgtatgggtcgtgatgaaaatcgcgtatccactacagtcggtggcttttacccgatgggggaaggtgcaggctatgcgggtggaatcatgagtgccgccttggatggtgcagaaacggcgattgcgtgcatgagcatgtatgcaaaacctaatgaatgatactttcacaaatagatttatacatttacgtgctatggtgaaagctcaacctggattttataaattgtacaaactcgtgtgatataatacacacaacatagattgaaatacattcgtttgtagacggaggagaatatggctcgattatttggcactgatggtgtacgtggcgttgttaatgaatttttaacacctgaattggcataccatttgggacgtgcagcggcaacacattttggtaaagaaaaagaacatcctacatttttaattggtagagatacgcgtatctctggttccatgttggaatgcgcgttggcatctggcatctgttctgtaggcggtaatgtagttatggcgggagtcattcctacacctgctgtagcttaccttgtaaagcaacaaggctttgatgcgggcgctgttatttctgcatctcataacccattcccagataatggtattaaattctttgatggtagtggttttaaattaccagatgacgtagaagatcaattagaagtatatgtacgtcaaagtgcagataacgaattacctcgtcctacaggtgctggtattggtcgtgtagagtataatgcaaatcttgcacatcactatgctcactttgttcgtcatacaatcgatacatcccttgaaggtttaacgattgtctatgatggcgcgaatggcgctgcttctagcgtaggtcctgaaattttgtctggtcttggtgcaaaggttatcaatatcaatgtcaatccagatggtttgaacatcaatcatcattgcggttctacccatatcgaaggcttgcaagtagctgttcaacaacaccatgctgatttaggcattgccaatgatggtgatgcagaccgttgcttgttagtagacgaaaaaggtcaagtcctcgatggcgaccaaatcatgctattatgcgctcttaaattgaaagaagaaggcaagctcaaaggtgatactgtagttggtaccgttatgagtaatatcggcttccacaaagcagctgaagaacttggtatgaaaaccgtttctactgctgttggtgaccgctatgtattggaatatatgcgtgaacacgatctttccattggcggtgaacaatctggtcacgtcattttcctcgatcataacacaactggtgatggtatgttgactgctgttcaagtggcggctcttgtaaaagaaaaaggccaaccactttctgaattggctggcatcatgacaaaatacccacaagttcttataaacgtacgcgttgctacaaagactggttgggaagaaaacgatattattaaggctgctatcgtaacagctgaaggtgaacttggtgacgaaggtcgcgtactggtacgtgcatctggtacagaaccactcatccgcgtaatggcagaaggtccagaccaagaagcactacaagccttatgccaagaaattgctgatattattggtagagaacaaggattggctgaatagctatataattttgataaaaaagcactactttgaattgtaattattcagagtagtgcttttgtcattatttatcagcaacaacgagtttatatccgttcaagtgaatattatctcctgtagtatcttcgttcgttaaggattttacatagctatcgcctgtaagtgtccaagtggaatctttgctgagtttcagtgtaatttcttttgctgtattgtcagtgttgatagcgccaactaaactagatccatttgtcatgtctagcgcaatggtgctaattgcatcggctacaatattgccgtttaaggcttggttggaggcgcgaagtgtaaggtgaccgccattttcaccggttttgccccaacgggagtcggccgctgctttcactagtgttgtagtattgggagtagagatagcattgccagtaaggtctacctctgcagtggtgttgttcacatagatgaaagcgcctgtagcatgggtggtgagtgagttgctttctgctttgagacgggcaataccactttcagcatcaccagaaaagctttggtatagcataaaaccattgtctttgtagcctgttacattagagttggtaagtgtgatggaatttttgccttctacgacaccaatttcactgtttttagcttcgcccgtaatatagtcagctgtgatattaccagtagagtagataatagggctaccttcaccagatgttgttaatttggcagcctctgctgtaatggtaccttcgccacggtctgtagctaatgtagcagagtgagcaccttcggttgtaatagtaagatttttgccgtttacagtgcctttataagtggcatctaaaccacgggaggaatcgctctttgtgtgaatgttagtattttctacattgatgacagaaccttcaccagtggcaaatactgcattcgagccattggaattggatgtaatattgctgcctttgatgttgatttgactaccgtcggtaccgagtattactgcgttttgaccacggaaattactattattatcgcttgtcgtattgcctgctttatcgaatacgctgttttcgatggttacgactgctttatctttgccgatgaacgcattttgatctgatgttgtattagatattaattcatgcgcaatggctttattttcggttactaccgtagtacctgtgaaagtattaggattagcttcagcttttggaactggcccattaggcgcactcataggtggatttccagctggtggtgcacttggtatgtcttctgcaaaggttggaaggaatgccaatgtagaaagggcggcacctaatacggcaggaagtacccaacggcgtaattttctatatgagtgtttatggtttagagatgttgtctttttatgtgttttattattttgtgtattcattgtaatctctcctgttagacaataaatatgcatcatataaatttcgataaatatgattgtataaaatttttataataagtagtataataatggtgtatgagtgatctatgaaatcgtttggctttatgtacccctatgaaaataagcgttatatcttgtgtttaatgctttcataaggcctagattctttacattcattacatcgatttagtataatataatttagtatgattacaattgtactagttctgccacatatgagtgaaaggagttccaaattcgtaaaggcgaatagcgcaagtacccgcgaaggcagtcgttagggtagacgaggggaagagtgatcgaatcatcagcggatgctcttccggcacattcatgtcgtaacagatactaaaaagcccattggtaacaatggagacaaagtgtatctgaatgaattgtattaaagtaataattaatacataattgaaacattaatctagaacattaatctagaatattaattagttagccttagttgttggctggggctagaatgcccccagttataggaggatatacttatgtgcggtatcgtaggatacattggctttaatcaagcatctgatttcttattggacggtatggcgaaattagaataccgtggttatgattctgcaggtattgctgttatcggccctgaaaatgtaattaaaattcaaaaaaaggttggccgtctagctaatcttgaggcgattgtaaaagcagatcctaatgaagggactgtaggtattggtcatactcgttgggctactcatggtcgtccatccgatatgaacgcccatcctcatgcatctgaagatggtaaatttgctgttgttcacaatggtatcatcgaaaactatatgcctttaaaagaagagctcatcgaaaaagggtaccatttcaaatctgaaactgatacagaagtagtagctcatttattagaggatatgtacgatggcgattttgtaagtactgttcgtcgcatgcttgatcgtgttgatggtgcgtatgctcttgaaatcatctgtgctgatgagccggacaaaatcatttgtactaaaaaagaaaacccattggttatcggtcttggcaaaggggaaaacttcgttgcctccgatattccagcaatcattaactacacacgtgatacatacatcttaaacgatggtgaattggctatcgttacacgtgataatgtatccgtatttgatcgtgcaggccatgcaatcgataaagaagtgttccacgtaagctggaatgcagaggctgctgaaaaaggtggttatgaacacttcatgttgaaagaaattcatgatcaaccaaaagctgtgcgtgatacattcggtacacatatctccgaagatggtaaaacagtaatctttgatgagttgaattggactgctgacgatgtagcagctttcaataaaatcctcatcgtcgcatgtggtacagcataccatgcaggtcttgtaacaaaacaatatattgaaaacttggcgcgcattcctgtaaatgtggaaatcgcatctgagtatcgttatagcaatccgttgactgatgataaaacattatgtatcgttatcagtcaatccggtgaaacatccgatacattggctgctttgaaagaggctaaacgtcatggcgctaaatccttggcaattacaaacgtagtaggttccagtatttcccgtgaagcagataacactgtgtacacatgggcgggtcctgaaatctctgtagcgtctacaaaagcgtatactactcaattagtagcaggcttgttgtttgctgtatatcttggccaattaaatggtaaaatggatccgactttaggcggagaagtcctttgcggtgttaaaagcttgcctacattgattcatgaaatctttgaagtagacgaagatatgaaagcctttgcaaaacattatggcttcaaatctgatgcgttcttcttgggccgtgctatcgactacgcagtagcgatggaaggtgctttgaaattgaaagaaatttcttacatccatgctgaagcatatgctggtggcgaattgaaacatggtacattggctcttattgaagaaggcgtacctgttatcgcattggctacacaagaagatgtgtacgataagatgatcagcaacatccgcgaagtaaaagctcgtgaagctgttgtaatcggtatcggtatgaagggtgacgaagaattgtctaaacacgtagaccatacaatctatgtgcctcgtgcaaataaattcatcgctccaatccttgcggttgtaccattgcaattgttggcgtactacgcagcgattacacgcggcgcagatgtagataaaccacgtaacttagctaaatctgtaaccgtagaataatatatataaccaacagtgcttcggcactgttggtttatttcaatatagggagactattatggcagttatattttccggcatccaaccaagtggtgaattgacacttggtaactatttgggagctttacgtaatttcttagactatcaagatactgatgaatgttattattgtatcgttaatcaacatgcgattacagtaccacaagatccaaaagagttatttcaaaatactcgcaatttggcagcgttatatctcgctgttggtctagatcctaaaaaggtaacattatttgttcaatccgaagtacctgaacatgtaaaacttggttgggttatgcaatctattagctatgtaggcgaattagaacgtatgacacaatataaggataaatctcaaaagcaaggtgactctattcctacagcgttgcttacgtatccaccattgatggcggcagatattttgttatatggtactaactatgttccagtaggtgaggaccaaaaacaacatcttgagttgactcgtaatttggcagagcgttttaaccgtagatttggcgaaactttcgtagtacctgatatcaaggtaggcgaaggtggtgctcgcgttatgagcttacaagagccaactaagaaaatgagtaaatctgatgataaccaaaatgctacaatccgtcttttggatgcaccagacttgatcgtgaaaaaattgaaacgcgctcaaactgactctgacaacgcggtgcgttacgataaagaaaacaaacctggcatttctaacttgatgggcatttaccgtgctatcacaaaagacagctatgaagctatcgaagaaatgtatgctggtaaagggtatggcgcatttaaatcggatattgctgatttgcttgtagcaacacttgaaccaattcaacaacgatacaatgaactcataacaagtcctgaactagatgtcattttagatgaaggtgctgcaaaagcacatgcaaaagcatctatgatgtatcgcaaggttgaacaagcgatggggctttgccgtaaataagtatttacatacacttttgaggtcaattatgacaaaacaagaggtaagcgaacgattttcgggtggccatgtaaagcacatggtcaccacacataaggccgtacagtggctaggacggattctaggcattgtaatttgtgttgccctcattaaatgggccccacatgatataggtaatcgcatgctttgttatgcattggtcgtttgcttgttatggtgggtacacgggctcgatgtagtgctcgtatatatttgtgacaaaggctttgttatcaaacagagaccgacaaatttacgtgattattttcgtagtgccattaatttagatgattactatgtgtatgttccttttgaaagcgtagttgggtttacgcctgattggaaagaactacaagccgttaatactcatggtggcatttatgtagtacctttagatttgcaacttgcaccgtataaggataaaatgcgccttcaagccgccataaaacattatagagatacacatgatatataattttgtaaatttattgatttaactatttacaactttaacacgctaaagtataataggttcataagttaaaacatgacctataacatattgtgtggaggatattatgaactggaaaaagattatggctgtaggtttggctgcagtttctatgatggcttttgtaagtggttgtggtagtgatacaaagaaggctgatactcaattacctaagaaaattgttattggcctagatgatagcttcccaccaatgggctttaaagatgataaaggtgaaatcgtaggtttagatatcgacttggctaaagaggctgctaagcgcgctggtatggatgttgagttcaaagcgattgactggtccagcaaagaagcggagttaaaatctaagaaaattgacgtattgtggaatggtttaactgtttctcctgaacgtgagaaaaatatcttgttctccgatacatatatgaaagataaacaatacattgttgttcgtaacgatgataatgctatcaagggtaaatctgatcttgctggcaaggttgtaggtgtgcaacaagctagtactggtgaatctgcattacaaaacgatcctagtggcaaaactgttaaagaaattaaatcctatgctgatttcgtaagtgcattcatggatcttggcattggtcgtgtcgatgcagttatcgctgatggtgttattgctcgttacctcatgacaaaagaacctggcaaatacaaaattgtagaaggcactgattacggcgtagataactttgctgtagggttccgcaaagatgataccgtattacgcgataaaatcaatggtatcttagccgaaatgaaaaaagatggtactgctgataaaattgttgaaaaatggttgggctctagtgcagatctagataagagcgatgctaaatagtacgattcgtgatatactaatagtactgtggtcagtatgtacaactgataattaaagaacgaaatgtacactagagaagaggccatgtgcctcttctctattcgtgttttgaaggagtatttcatgttagattatttattgcagattatcccgaccattgcggatgggcttaaggtcaccattgcactgttctgtgtcgtatgggtactatctatacctggtggtatcatattagctttacttcgactatctaagcttcctgtagtcgataaaattgttgaagcctttgtatatctaatgcgtggtacgccattgatgttacaaattctatttatgtattatgcgttaccgattatgactgatggtgctattcaaatggatgatgcaacagcggcagtggttaccttcgtacttaactatgcagcgtacctttgtgaaatcttccgcggcggtatccaatcgattccacgtggtcaatatgaaggggcaaaggtgcttggttttacctatggtcaaacgatgcgtactataattttgccacaaatgtttaaacgcgtgttgccaccacttgccaacgaaacgattaacttattaaaagatacatccctcgtatacgtattagctatgaatgatattttgcgtattacaaaatctattgtacaacgtgattttgacatttctgcgttccttgtggccgctatattctatctaatctttacatttattttgacaaatatctttaattatttagaaaaacgtttctctgtatatgatgagtaagaggtaattatgacttttgtaaatatggaacgcatagagaaacactttaataataatgtggtattgaaagatgtttccttgcaaatgaataagggcgaaattgtatctattatcggtccatctggctccggtaagtctacatttttgcgctgtttaggtcagttggaaacgattgacggtggtactattaccgttgatggtgtaacgttggcatctacagatgctagcggcgtcgttacctacgctgataaacataccatgcatgatttattacttcgcatggggatggtattccaatccttcaatttgttcccccatatgactgttcttgaaaatattatggtggcaccgcgtatggtaaaaggtatgaaagataccgatattatgccaatcgcagaacgcttacttaataaagtaggtctttgggataaacgagatatgtatccctctagattgtctggcggtcaacaacagcgtgtggcgattgctcgtgcattagccatgaacccagaaattatgctctttgatgaaccgacgtctgcccttgatccagaattgactggagaagtattaaaaacgattaaacaactagccgatgatcggatgactatgattattgttacccatgaaatgaactttgctcgagaagtttcagatcgtatcatctttatggcagatggtatcattcaagaagaaggggaaccggaacaattgtttaccaatccgcaatctcctagaactaaagcttttttagaaaatatgttataatccttaccacctatgtaatcataggtggtaccttcacatatatgaaaggaactttatgaaattacctatcgcattagtattagctggattgtccatcgtatctagcgttgcttacggagcctctcctgaacatactacgccaaagtctatcgtagcctcgcaagcagatgctctttccgtattgccagagcaatataaatcgtatgctactaaaatgaatacggttgtaaaggatacgaaacacggttatactttcaccattccttggcgtgtaaatgatggtgttatgattgatatggatgtacggagtgaaagtgaacatatacaggggtattcctttaatttgtctggaccaaatcaagacgacgcctataccgtgtcttttacaaagagaaataatacaccgcaaggcaatgtgtcacaaaaggtgtggaatacaacatggtatgatgttccaattaagggtatgacggatgaagaataccttcgtatttggcgtcaacatagtaatgtatttgatactaacgatatagtgggcggattcttccctaaaaagggtgcacaagcagcacgctggagccgcacgacaccgaagtcctatgcagagatgacatctacagaaaaggttcattctatttttgaagctgaatttattatggaaaaagatccaacgcatcgctataatcttgtaagtacgtatccacctattcaggctaaatttatggaacaaggtcttatggaaacgacagttccttcattttctttgttagatactaagaagactggctctacattaaataatgttaagaaactattgtcaggttccagtgatatcaatgtagcagaaggtttgaaattcgttagtcctaaaggattttcacgcattaatgaccctaaaaagattactttcacaaaggataagattcgtctcgacatagaaagtttttctgttcctgtacaagcggtgagcagtgctatgcctacgatgatgggcaagcagatgctaggtgaccaatatgtaaaatctttggtggatgtaaataaggccaccattgaacgatatgaaacacatattattgatggtgccgttatgttttatgtagctgggacaatgaagaatcctgaagtcgcagatacgaatacggcggaaactgttacattcggagctacgattattcttggaaataatggcaatgtcggtgtagctcgcatgatagcaccaattggtactgtattgactacacctgaactaatcgatattttagatggatttaagttaacgaattctttaaatatcaataattcgtctcaagttctttaatctgcaaaaaaatgtgctataatgtatataaatcctaattgaaaaaagaggatttttcctaattcgtctagaatattataaatagactaaacgatttttaatcatatcccttcatggggattagaaataggaggggttaatatggttacctacaaaactattgtcgtacctactgatggttctgaaaatgctaaacgtgcactagaacatgcacttgcagtagcagatcgtaacaaagcagaattgattgttgttcatgtagcaaatattgtatctgctatttccaactttgatcaaacaccaatttctggtggctatgtgtctgaacaaattgcagaagacatggaagaaacaggtaaagaaattttgaacgatgtagtgaaagaaattcctacaggtgttaaagttaaatctgtatttgaagttggttccccaggcccagcattgttagctgttgctaaaaaatacaatgctgatcttatcgtaatgggtagccgtggtcttggacctttgaaaggtttattcatgggtagtgtaagtagctatgtaactagtcactcctcttgcccagtattggtcgttaaataatatcatacaatttaaaggctttgtcattgtgtacaaagcctttttttgtatataatagatatcatagacatagtatttaaatttagatagattattagtgttagtttaaaagaaaggatccctatgatcgacgggaacgaatcattgttaaagttagcagaattgtttaagattcttggcgatccaacgcgcctaaagattgttgagatactgctagaaaatgagatgtgtgttaatcatattgcagatacaatgggcatgggacaatctgctatttcacatcagttgcgagtattgcgacaagctcgtcttgtaacatatcgcaaggaagggaaaactgcatattattctttaaatgatgatcatgtagaaggccttgtgcgaatgggtatggatcacgtatcacatcaatagagtactgtacctggtctatcacgttgtattatatgaattagatacaagaaagggagcctcttggggctcccttttgatgtatatatttttagtataatggaaataaataataagctaatgtaataaagagtggcatggtcactgccgataatatggtggtacccattacgatttgcgtagcgtattctgggttgtttttcatttcgatagcgatgagggccatgttgatagccgttggtacgctataggtaatgacgattgtttgtgccgcaattggatgcataggaccatagaagataataaatagtatggtcataacagcggctaataggggacttatgataagtcgtaatgcactagctaacatgacgtcagctttaaagaaattcaatggggtccggttaatttgtacccctaaggctatcatggctacaccaacgaaggcgttggcaaagatgttgagaggagcaaagaagaagagactatgaagatcgaatggcaataattggcatagtaaggccagtggaatggcgtataccatgggcatgtggaatacgacatttagtgcatctttcgtacttaatcgacctgcacctgcttgatagaatccataagtattgctcgtaatggtttgaataatcatgatagatactacactcacgagtcctaagttagcatagggcgtagccccatcgatgacatatggtacattagcaaatacaaagatggcaagggccacccccatattacctacattattgaacatgacacagttttttaatgttgcgattttagctacatcgtaaccccgtatgcgcccaataatttcagaaataatagagtttagtatgagtacacacagtgcacagaaaacaatttccaatgtacttgaagtgaatttagcctcatacatcgccctaaatacgaaggtgggcaataatatatagaaattaagtttgctcagtgtatataagtcaagtttaaattttttatctaatacaaatccaacgcctataagcataaatataggaatcatggaattcatgaagatatggcctattaatgttaataaattcatggtctcacctagagttctataatatgtataattgtgattacaatcatggcatacttcggttataatcaatatactatgttatatatatcatacatttcatatatagcttatacctgatttctttataatagtatcataccataggatgtagtgtttaggtttatatttttaagcatttatatgtattaattccgtagggagtaggaggttgtatgagaaagattctattagttttaatgagtatttgtatgatcgcctttgtagtaggctgtggtaatgatgcaagtaaaactacggatagcgcaaagccaagtacgtctgaaaagattacaattcaagcggctgctagccttaagggggctcttactgaattagcagatgcgtataagaaagagcataacttagcagatgatcaaatcacaattaactttgctggctctggcacattgcgtcaacagattgaacaaggtgcacctgcaagcttattcatttctgcagacgaaaaaaatatgaagatgttacaagataaagatttagtaataaatgtaaaaccatttgtaacaaatgaactcgttcttgtagttcctaaaggacaacctaaaattgagttagatcaaatcgcatctgtaaaacgtattgttttaggtaatccagataccgtacccgctggtaactatggtaagcaagtactaacaaaattaggtgtatgggaccaagtagaacctaatgtggtatatgctaaagatgttaaagctgtaacggcttccattagccaagcggctggtgatgcgggctttatctataagacggatgctattgcagccggtgatgcagttgaaattgctgcagtaacacctgcagattctcatgatcctgttatataccctatcggtattattaagaaatatgataatactttggctcaagatttctatacatacgtaatgagcccagagggccaaaaagtattggaaaaatatggattctctacgtctaaataagaatttaacgctagcttttagggctagcgttttcttatgatacaatagagttataatttattatccggcagagattcggcaaagaaaggaggcccgatatgagtccattttggttgtcattgtgggtggcgagtttagctctagttattgttatattgacgggcttagctgcttgttactggatgaatcgatgtaagtggagtggtatcgctattctagatgccctaataacattgccactcgtgttgcctccagtagtagttggctttgctttgcttatggtatttacaccgggctatgcattcggcgcttggttagaatcacatggtttaggcgtcgtatttactgcagcaggtgccgttgtggcctcttctgttattgcctttcctttgttttatcaaacggtgcggtccgcattgcagtctgtagaccataatatggaggacgtagcacgtacattaggtgcttcagagttgcgcatattttttacaatctctgtaccattggcatggaaggggattttaacgggcagcatattggcattttgtcgtgctatgggtgagttcggtgctaccatattaatcgcaggtaatattcctaaaattacgcgtaccatgccacttgctatctattcctatgtagaggcaggacagtacatggatgcctttgaactcgttatttacatttgtgtgcttacattagcgctattgagcgggattcacatccttacaaaaggatccttgttccgtaatttagggcgtaattaggagggactatgattacattttcttttaccatagcaagaccttctatgattgtgaaagccgatggtactttagcttcaggaattacggtgttaaccggttcatctggaagtggtaaaagtacgtttattaaatgtattgcagggttagtgaaacctacaactggtatcattcgatgcgatggacgaacatgggttgaccgagatcaaaatatatgggtgccagctcaagagcgtcaggtaggatatatgccacaaggcaatatcgtatttcctcatttatccgtggaacacaatattacatatagtaaacgaggcacacctgatatgtgtgattctctattaaaacgtttaggattagaaaaataccgtaacactaaggcggggcgcttatctggtggtgaacaacaacgtgtggctttaggtcgtgcactctattcaaaaccaactatattgcttcttgatgaacctttatctgcattagattggaaccttcggaaacaagtgcgtgaggatcttgtttccatcattcgtgaatgggacgtaccttgcgtatgggttacccatgatgaaagcgaagctgatgcagttggtgatagacactggatctgtgaagacggacaaattattatacctgagtagtaaaacaccttcataagcatgattgcttacgaaggtgtttttgttttagtgttgttttatttcgacagatgagttttctgtatgacttatgaagccaacgatagctgtaacgacaaatgccattgtaaaggccggtaatgtagcacctattgtactttcactatgtaacatatagtggtataaaccaacggatacggcccaaataagacctcgtacgagataagcggatagtgtttgtacttgctgacgattgataaagtagtccgccaaaagaatggcaatcatcggcgcaaatacagagccgatgaggtataggaagtctgtaatatcatccattggatatagaatggcagcgatggtgccgacaatagttacgatgacggcgatgcctttactagatgcactgttatagatggtagtactagatacgcctgcagagtaagcgtccataaaggttgtagttacggtagagaaaataataacgatgaggcccgcaaggccaagtcctgcattcatcatgatcgtaatgatggagtcgccgccgccaaagatagcggcactaagacctaaggtgtacataacgatacttgttacagtgtagactgtagcacttgtaagtgatgcggagaaaggttttttactttcacgggtataatcactgatgagaggtagccaagatagtggcatggcgatagataattcaagggcagcgatgaaactcatgtttccgctcgttagaatgataccttcactaggccactgcgatatcatgtgagcgcccatgtagagggtgagatctaacaatagaactgatacgatagcttgaatatagcccgtattgtggaggccgatgaaaagccacaagatgacaagcgcgccaatagctatcgtccaaattataggagatagaggtgctagttcttgtaaggctagcatagcatcgtagatcatgatgctagtccagccgataagttgaagcatatttaaaaaagcaaagcctttagcccctagtgggccaaagctgaaggcagtagtattcatactgccttgccgtaaacgtccaccgatgaggccagccccaaagagcagtatgccgccgatgatatgccccagtataatggcatatagaccttgggtgagtcctaagggggccagataggttcctgtcataatttccgctatagatagagcggcaccaaaccatatcatggcgaactgtggttgtgtaatgtatgtgtctttcatacgtcctccttgccaaggagtcatagaaaaagccgagttcataggaactcggctattaatcctctatgttccctacgttggcattatccaaatcaggttatgggttaaagcattagcttactctcagcccactcatgtgagcaccccgttatggcttcattataggctgttaagaggaacccgtcaattattttcttgcatagattgtataatgatgttataactagagtataaaaatatattgccactaggggtgcttttgctgagattgaccattcaaaaccctagacctgatccagataatactggcgtaggaaagtggagtgcaacataatactaaactattacgagaccattccattgggagtggtctcgtttttatatgtttggaggtattatgaaattacatactgcattaacaattgccggtactgacccgagtggtggcgctggcattatggctgatttaaaatcttttcaaagccgtaacgtatacggcatggctgttgttacctctgtggtagcccaaaatacaacgggtgttcaccacgtagaacatctatccttagagagtatagaaaaacagttacacgatgtgtactcagatattatgccacaagccgttaagactggtatgattgccttaccggaaatgatggatctcatttatccttatatgagtaaaccaattccttatgtaatggatcccgttatgattgccactagcggtgatcgactcgtatcagatgaggcggtacatttcttaaaatctaaactgattcctaccgcaacggttatcacacctaatcgcagtgaggctgaggtcttagcggacatgactattaattgtgaaagcgatatcacaactgcggctaatcgaattttacatgacttagggccccaagtggtcatcattaaaggcgggcacattggtgaagatgcaacagattatgctttcactaaagatggtagcgtccgtacgtggacaagccccaaatatgatacggtgcatactcatggtacgggctgcactttctctgcagtgattacggcggaactcgctaaagggcgagacgtcatggatgccatcggtattgccaaggattatattgctcttgctatcaagcataatccagcattaggcaatgggtgtggcccagttaaccacatggcctatggtttattggcgaatggaactgaaacgatggatgagctcttgaaaaaagatgagaggagatgatgctatgaatccatatatgcataatcaaattaggcctgaattcaatatattatacacattgcggaagaaaaatcctcttgtgatttgtattaccaatgatgtggtacgaacctttacagctaatggactactagccattggagcatcgcctatcatgagcgaatgtagtgaagatttacaggatcttattgtgtatgcatcagcactgctcatcaatattgggacacttacacctgagaaggttggttactataaagaggctattaaattagcgaaggaatatgatgtaccaattattcttgatcctgtgggctgtcatgcaggagcttaccgattgtcggtggtcttagatttgattaagactggttctatttcgttattacgaggcaatcaaagcgaagttaaggctatttatgatgcactgggttctgataataaggatgaaaactctccgttaggtaagggcgttgatggggcacaggtagcggatagtgccattatcgcatatcgtttagcgcgtcttattaactgtcctgtagtagcaacgggcgaaaaggattatgtatctgatggaactcgagtctttgcagtgcctcatggtcattcgattatgactgctgtaacgggaacaggttgtctcttgggggccgtattagcagcctttttgggaatttatgatctttttaaggatagcctgtctacaggtgaatttcttgcctatgcattggcgtattatggtttagctggtgaaagtgctgttaaggtaagtggaataaaaccaggtagctttagtatagcctttatggatgctttgtatacgctagatgatgaggtgcttgtatctgaaaatcgtgtgcagtctgtagttgtaccagatcaattacaggtgtatttcgtgtgtggtacacaagatacagagcttaacaaaaaacggttgctcgaaatcgtagaagatgcttgtcgtggtggtataacctgctttcagtttagagaaaagggcgatggtacattagaaggtcaacagaagttagaactagcacaacagttacaacatatctgtgccaagtatcatgtgctctatattatcaatgatgatgtagagctagcggtcgctgttaatgcggatggtgttcacgtagggcaagacgatatgtgcttagaagatgtgcgtaatatcgtaggtcataaggtagtagggatatccatccattccatagaggaactccataagacagatgtactgtatgctgattgtgtaggcgtaggtcctatgtatacaactagtagcaagcctgatgcgcaagaaccatgcggcccggaacgtacagctgaactacaggcagaaggattaaccttaccatgcgttggaattggtggtattaccatagacaatgcaatggcagtactccgtgctggcgcttgtggtgttgctgttatatctgccattgcccatgcagaaaaaccttatgaagcggttcgacaatttaaagaattagcatctagcctttaatagtaaatagtataacttacaactcttaatgcatatataactaatagaacacaaaaaagacgatgaccgaagtcatcgtcttttttattgaggttgtctgtacatacagttaggaagaactgcacttgcagtatcaaatatctgtatttaaaatattgttttatctaaacttatagattagatggattcaacgtggcgttggaagaaagcttgtgggtgagcacatactgggcaaactttaggagcttcttcaccaacgtgaatgtaaccgcagttagcgcaaatccatgcaactggttgatcgttgtggaacactttgttgccagaaacacgagctgctaatgccaggtaacgagcttcatggcgagcttcgattttaccaacttcgcgcattttgaaagcgatagcagtgaagccttctttttctgcttcgtcagcgaaatctttgtacattgtagtgtgttcatagttttcaccagctgctgcatcgcgaaggttagcttcgatgtcagcggagatgtcgccaccatgaagagctttgaaccaaactttagcatgtgcagattcgttgtgagctgtttcttcgaaataatcagcgatttcgttcatgccagctttacgagctgctgctgcataatatgtatatttttggaatgcttgggattcaccagcaaatgctgtttgaagatttttttcagtgttagaaccttttaattctgccattttaatactcctttgtacttacatcaaatttcaaaatttttaccttagttatatattcataaccacttggttgtgaatgcaatggtgggtaactcacttgagtttaagttaaataaaaacttatttatatactgattagatagatacttgtctatatttgaaaaaagcacttgcttatcttttaaatgagtacttacctatagttgtaaagaggcacttgcctataatttacaccacaatgtttttgattcgtatacttaacgaataatcattgttgactatattgtaacatactaaatgagaaatgcaagtgtttttgtaaaatttatttcgagaattttctaaatgataaatattatcaatgtagcaaataagcggtttttgaaagcctgttaggtaatggatttattaaaaatagaattactgataatgagaatgagagttacatggaaaatcattattgtttatagagctgtttgtttttggtaacaattctgattaagccgatagatcttattagtcaaagtgtacttttacctatattggagaacatattttaagtataataagatatatataatagaaatagtataaggaggcgctatggcgtttattagatattatgtgggcgatatagtacaaatgaaaaaatcgcatccctgtggcagtgatgagtgggaggtcaagcgcataggtacagattttcttatcgtttgtaaaggttgtggtcatcagttgttgatgcctcgccctaaatttgaaaaggcagcgaagaaaatagtatcgcgcttgcctgaaaatgaatgaggtaggactatggtacgactcactgattatgttacgagtggaggctgtgcgtgtaagattggtcctcatatattagaacgtgttttaaaggccgttacacctgttacaaatgaacatgttctagctgatatgactggtgctgatgatgcaggggtatatcaaatttctgatcaacttgcccttgtacaaacattggattttttcacgcctgttgtcaatgaccctacgttattcggtaaaattgcagcggctaatgcattgagcgatgtatatgcgatgggggggatacccctaacggcgatgaacatcgttggatttcctgttcccttagtagaacaaggcgtattgacggatgtactcaatggggctgcgtccattgtttctgaatctggtgcagccattgtaggtggtcacagcatcgaaaataaggaacctatttttggcatgtcgatcacaggtcaagttaatcctaatgagatttggaagaataaaggcgctcgagtaggggatgtattggtgttaacaaaacgtatcggcacaggtattatgaataatgcgttgaaagctgatttatttcctactggtactgcgcaggcggttgctagcatgagtacgttgaatcgtgtggctgctgaggtggcccataattttacaattcatgcgtgtactgatgtgacgggctttagccttatggggcattctgtagaaatggcgagtgcctctaatgtaacaattcatatcaagatttatgatattccgctctttgatgacgtcattgacgcggctcgaatgggccttgtaccagcggcgtcctatggcaatcgtaaggctattacagatgtacaagtagataaaatattagattctgtgtggacggatattttatttgatccacaaacatcaggcggtcttttattctctgtgcctgctacagaaggaccggattttgtgaaagctttacatgatgtgggcgttaaaggtgccactatagttggtgccgttgaaagctttagtggcttagcggtacgcgtcactaaataagatatattacaattttgattttaatagtatatagagtcgttgtgcgttgatgctttcacaaaatatataataatattgaggtaaataatgagtaatacaaatgaattaactgtagatgtgcgtggcagtttgtgtccaaaacctgtgattgaaacgaagaaggtaagcgatgcaaatccagacgcgattattacgaccattgtagataacgaggtgagtcgcgataatgtagagaaatttgggaagtctcgtggctatgatgtggcaattggacaagatggtatagattttttcattaaacttacgccgaatgtagaacctgcaccggaaattggttgcaaacctatgaattatagtgaccgcatcattttgatgacgaaagattatcttggtgaaggtagtgaagaacttggccgtaatttgatgaaaaccttctgggtgtgcatggttgaagccgatgtgaaaccatctacaatttatttcatcaatagtagcgttaaaatggtaaccaacgattctgttcatttagataatattaaaaagttagctgatcttggtgttgaaattgctgcatgtggcatttgtctcgactattatggtctaaaagatcaagtgggggtaggctctattacaaacatgtatgcgattacagatgctatcgttggggaaaatcttgttaaactataatactcgtatctatgttgtaaatgattaagcaatattattgggggtgaggcgttgaacaataaaaagttgcttgtcgtttttacatcctattattttggggataaagcagataagatattaacagaactttcggtgcctcaccaactgatggctacaccgccagaattgaatgatatgtgtggtttgtccattcaaatagacttgaatactgtagaacaaattcagactatcctaaaagaacataagattagtaaatcaggcttattttggtatgaaaaagggaaaccagttttagcttataaagattaaatcgattttttaatatcgaaattcatctatatatgataacattaatatataaaaatcttattgtataaggagatatacatggttgattttaccttgcctcgcgaatatatagacgatatggtcgtccgtatggcccatcatagtacagcaatcgaggggaatacgttaacacaaggggaaacaaagagtatcctattagataatatgataccccgtaaaatggatttgcgtgagttctatgaagtgtctaattatcgcgactatttagtattcttgatggaatcatatcaagaagtaattacgatagatatcataagagacacacaacgattgttactagcacatatccgtgatgataatgggcaatttaaggttgttccaaacatggttattggtgctgattttgagccaacaaaaccatatcaagtacaagaagctttaaaaaactggtgtgatacattgcaatatcgtttagagatatcccaaaatgatgaagagcgggtgcgtaccattatggagcaacatttgcaatttgaacgtattcatccttttgctgatggtaatggccgtacaggaagagctcttattgtacacgcttgtttacaacagaaattagcgcctattatcattaacaaagatgatagaggtgaatatatgactctgttaaatgatggtgatttaaatggcttatataagttaggtcttgatttattttataaggaaaaagaacgtatgattctatttggtcaaaattttggctaatgagcatcatatgttatgtatctaggttaagtttttgaaattaatataatgaaaggttgaatttcaatgagtaaatatgaaatagaaaacgtaaaattaacagcccctaaattggatcgtaacgatttagaatatgctatgacatatcgttatgcatgtaaaaaattcgatagcactaaaaagatttctgacgatgattggaatgcgattctgaatgcagcgcgtttgtctccaacatctcttggcttcgaggcatatcaattgttggtgattcaaaatccagaaattcgagaaaagatgaaagcttatggttggggtatcttagcagggcttgaagccagtcatgtagtggttttcttagctcgtaaaaaggcagatcttgaattcgattcatcatatatccgtcatattcaagaagaggtgaaacaattaccagctgaagttgatgctgcatatcgtgaaaaatatgctcaatttacaaaagaagattacaaaacatttgaatctgaacgtgcggcctttgactgggcgtccaaacaaacgtatatcgttatggcgaatatgatgaccatggctgcttatgaaggcttagattcttgtccattagaagggtttaatcaagatgacatgacagcattcttaggtgatgaacttggccttttcgatactaagcactttggcattgctgtaatggctgcctttggttaccgtgatgaagaacctcaccgtaataaaacgcgtcgtacaatggatgaaattgtaaaggtcgttgaatagaatatatcaaaatatttacaagaagaatgttaggaccatagaacactacttttgctaaagtatgctaactttatatatcgcacttcatttaacctttaaacatgaatggtacgttataaatatacataatatttaacatatctgtatatttagatgatttttaagatacatgtatataagcgtaaaggagtgattatatgttatggtcaattattgttggtggttttatcggatttctagcaggtgccatcactaacaaaggcggtgcaatgggcgttatcgctaaagttgttgctggtttaattggatcgtccgtaggtcagtccctatttggtacttggggtcctagcttagcaggtatgtccttaattccatctgtattaggtgcagtcattgttgttgctgtagtctcatttttcttcggaaaaaggggatagtaatctacttataaaagtaggtctaatatagctaaacgtgattttacatgaaaggagtcactattatggcattagaagaaaaactcaaccaagctaaaggtgcactaaaagaaaatgttggcaaattaactggtgacaaaaaattggaatcagaaggcgccgtagaaaaaacaactgctaaagttaaagacgttgtagaagatgttaaagatgctgtagaaggcgcacttgacggcttgaaaaactctgttgataacgataaagaataaactcgtgtttattcaacaatcacataaagaaaatctcattaagagacaacaaaaaccagtaaatcgttcgatttactggtttttttattgctattaatttgcattatacgttgaagcggaagtgtgttacgtcgccgtctttcataacatattccttgccttctaggcgaacaaggcctttttctttagcagcattttggctgccgcaagcttgtaagtcatcgaaggatacgatttcagcgcggataaagcctttttcaatatcggagtgaatttttccagctgcttgaggtgcttttgtgccgtttacaattgtccatgcacgagcttccatttcaccagctgtaaagtagttgatgaggcctaagagtgcataacttgccttgataagcttagttaagccggattcttcaagaccgagatcttctaggaatgcagcggattcttcatcagataactcagcaatttcggattcgatacgagcggatacaacaacgatgccagcaccttcgttcttcgcgtattcttctacgcgttttacgtgctcgttagcggagtaatcagatacttcatcttcagaaatgttagcaacataaagagatggttttgctgtaagtaatgtcaactctttaatcatttctaactcttcttcgttaagaccttgggcacgaactggttttgcttcaccgagaccttcgataatgcgttctagcaatggtaactcagcgcgagcatctttatcgccggattttgcaattttttcaatgcgttgtttccgtttttctacggattcaaggtctgcaaggcagagctcggtgttgatgatttcgatgtctcggattggatcgatagaacctgcaacgtgagtgatattagggtcatcgaaacaacgaataacttgtgcaattgcatctacttgacgaatatggctaaggaatttgttacctaaaccttcgcctttagatgcaccttcaacgagacctgcaatatctacaaatcgcatagcagcagggaggatgcgtttggaaccgaacatttccgctaatacagctagacgactgtctggaacatcaacaacacctacgtttggctcaattgtacagaatggatagttggcagcctcagcgccagcttttgtaatagcgttgaataatgtacttttaccaacatttggaaggcctacgatgcctacttctaaatttgtgctcatggtaccacctttattaaaattaatttcgttctttgtgaaagctttcattagaaatattgtttcttataaaagccttgtcaaacacatattatatcatattctaatggatatatacatttctatagaattagtctagattatttatcaagaagtgctataatattagagagaaagttgaagtttcttataaaaaataatgataagtagatgtatttatataataaaaatataagtttttattatgatttgttttatagaaaattttgatgagtagatatgactatgtcagtgtgcaggcggacgtgtcattttgattgaacgtaaacgtcatgtaacgctgctaggaaaggaagttaagtatgttttctaagttatttgatagttttttagttcactatttagaacgttttaatgatcactgctttagtgtaaaagtgggtgacaatgaatataccattggcgaaggtatacctgagtttaccattcgtgtaaaccgcgatatccctaagaaagatttgctcgtttctgctgaacttgcacttggcgaagcgtatatgcgtaaggatattgaaatagaaggcgatttattcaaagctctttgtgttgtactaggtcatgttaataaggattctatcaataaaaaggtacttagttctctctttaatgtaggtcttaaaaagaaagatcaaaaacaacaagtgtcttctcactacgaccttggcaatgatttttatagcttatggcttgataagacaatgagctattcttgtgcgtactttaaacatgaagatgatagcttagaagatgcacaataccaaaaggttcatcatattcttgataaattatatttaaaagaaggtatgacattactcgatatcggttgtggttggggattccttttaattgaagcagcccgtaaatatggcgttaaaggctatggttgtacattgtctgaagaacaatggaagaaaggccaagaacggattaaagaattcggacttgaaggtcaagtcgaaatcgaactaattgattatcgtgatgtagctgcatctggtcgtacattcgaccgtatcgtcagcgttggtatgttggaacatgtaggtcgtcctaattttccattgtatatggaggatgcatccactatgttaaatgatggtggtttattcttgctccattacatcagtgatccatcagaaaaagaatctagtgcatggattcgtaaatatatcttcccaggtggatgcttaccgtctcttcgtgaaattgtttctattgcttatgactatgattttaatgttatcgatgttgaaagcttgcgcttgcactactataaaacattgatgcattggtacaataatttccaaggtgtacgtgaccaagtagaaaaagctcgcggtactgaattcgttcgtatgtgggacttatacctctgtggttgtgcagcaggtttctatattggcaatatggatttgcatcaaatccttatgacaaaagatgttaacaatgaattgccattaacacgttggtattaatagatagattttaatacgaaaaaaggaccgtcttaaggcggtcctttttgtgtgtcatcatacgctgttgttaatgtaaaaagaggataaccgaagttatcctcttaaggtgcgtatagaattatagagagtgagctcgcaattcttcagcagaatgtgtggaaatccaagctggtggaatatcgaatactgtgtagcaaccagtaccaccgtgtttagcaaggcggtagataccacgagcgtatgcaacaagtgcagaacctgtgaattcagggttagaatcaagttttaaagagtattcaacaacatgacgagtgccgtcagtgctttcaccagaacgaagaacgaagccaccatgtggaatacccttgtggttgcgatcaagttcttcttgggaaataaagttgactacagtttcgtaacctacgaagtagttttccatagttttgatttcgttttcaatttttgctttgtctgcatcaggagcagctactacatagcattcacgaaggtggcctttgtagccatcaacgtctggagtttcgccgttgcgaattgcttcaaggtattgttctttaggaacagtgtattgacgagcatcaagaacaccatcgatacgacggatagcatcggagtgaccttgggacacgccgcggccccagaatgtgtaagatttgccatgaggcaagatgctttcagcgtaaacacgttgtaaagagaacatgcctgggtcccaaccgcaagaaatcaatgtagcagtcttagcttctttagctactttgtctacattagcaaaatgctcagggatacgtgcatgtgtatcgaaggaatcgatacagttgaagtatttagttaccattggagtttgttcgataaggtctgttgcagaaccaccgcaaagaaccataacatcgatcttacctttgaagtttggtagatcttccatagtgtatgtaggaacaccagacactgtttctaagcctttacgacgagaaaatacgcctacgagttccatatctggttgcaatttaacagatgcttctacgccacggcctaagttgccatagcctacgataccaatacgaattttgctcatattagcctcctataaaattataaaatgtattgtaataactaatatacttattataacatagaaatttctctttttataatattctatagagttatacagcatatattatgtggagagaataattcgtttgttattattcatcattatatcgatacattgcgtatgggaatatacataaaagaaaacatcatatgtacaaaaattgacacatatacccctactatatatacaatgaatatatgcatattattgtgtatagtttgaggaggttatgagatgagaagaacgataaaccttgctgttattgctgctttaattattaccggtgctagtgcagaggtcatggtgtcagccactacagttgaaagccatacggatggaaaatccattgggttgaatttgtggggtgaaaataaacactataccgatgatttgaccgtcaatgtatctggccttggtgtaaatggaaataaataccataataacgttaccggtatttatgctcttgatggatcacaggttgccatagataaaaatgtaaatgtaacggttgcaaatccagcacctgcggaaagtggagagaagcgcagaccagacttagcacactattacatgagtggtatatatgctggttatggtggggttacaaatgatggtaataatgatgatacccgtattaccgtacaaggtaatgccaaagtagatgccattggcgtaggtttgcaagctaataaggatggatacattcggattctaggtggggcagatgtaaagacacatcctttaacgacatctgatacatattctgcactttcagaagaaggatttgtctatgtgaatactggcatggatggattgaaaccaggtgctaaggacgtcaatatgtatggcaatattggttttatcaataaaaactatggtattgataaaaatccacacaatcatggatcagaaatttcattgggattaacgacaccaaattctaaattagtgggtggtgtactcaatgaatttgatgaaagtaacaataatcctcatcatggcggtttgagattgtatttacaaaatggtgctacatggcgtaatgaatggttaggagctgaacgtgaatatcctacacaaggccgaccagatactgcaaattatctctatacaggtagtaaggtagagcatcttataggtggtgccacagaaggtagccgtggcattatccaagccgtagatgcacggcctattacgattaataattatgctggtcatacggctattgattatgaaaaaggtgcacctgctgcagaaaacggtaaaggtgaaattgtaattaatcatgctgaccctggctcttctgttacattgcgtagctccgtagaggctttgaaagaacatgctaatgccgagattccaggattagcagaaaatcaatttgtgaagaaaatagtctacaatggatatacgaagggtgagcgaaaccttggtgttaatgtgcatttagaaacaggtgtgattagtcctacattaaatgctaaacttagcccggatgattttgatgcagctggacgtgctatggtgtctaataaaaccgtattatccactagtgaaagtgaaattgtatccggtgctaagagtgcattagcatcttctgttatgcaaatgcgagccgataccaatgatttacaacgccgtttaggtgatgtacgtcttaactccgataatcaaggcgtatggggcaaatatattggtggtaaatctaaaattacagactctgcctatgtaaatcaaaattataatatggcgcaatttggctatgatacgaaacgaggaaactggattataggcggtgccttcttgtatggtacaaacaacagtgattatacactaggttcaggttctggtaaaactgctggattagcaatctatggggctaaacaatttaatgatggtcgttatttagatattattgctaaaggcaatcgtttgaaaaatgattttaccgtacataacagcttaggaacgtcgttgagtggtgactaccgtaatacgggtgcatctttgagccttgaatatggtaaacgtatcaagagaaataatggcttctatatcgatcctagcgcagaattgatttttagccgcttgtctggtgaaagcttcgatgctcgtacgaatactggtagcacagttcatattaattctgatgcggttaattccgctataggccgcttaggcattggcatcggtaaggaagctaagaatagtaatgttttccttaaagctgcattggcgcatgaattctctggcaagatgaaagcaacctatagcatggccggtgaaccaatgactaatagcgtagtagatttgaaggatacttggcttgatcttgaactcggtggttcatggagtttccgcccaaatacatatttatatggaacatttactaaaaacttcggtagcaccgttgatacatcctatcgtgtagatgctggcattcgtcatagcttttagttgaatcgaatatatataatttacaattaaataggcatagaaaagaccggtcatagcaatgttcagattgacagttgccataaccggtctttgtatgcttatagttaattcttattgaaaacagaatatctataaaattatattagaattgtaatgttttaatgcgttctacggcacggattgtattttcacggctgccgaatgcagttaaacgaaggtaaccttcgccgtgtggaccaaaaccagagcctggtgtagatacgatttgtaccttttcaagaagaaggtcaaataattcccagcttgtcatgttaccaggtgtttttaaccaaatgtaaggtgcatcagtaccaccgtatacagtaaggccgatggattcgagaccttctttgataatacgtgcattttctttgtagtatgcgatgttcgcacgcgtttgttcacggccttcttttgaatataccgcttcagcaccacgttgaacgatgtaaggtacgccgttgaatttagtgcattgacgacggttccacatagggttcaaaggctgacgttcaccagatttagttttacctgttacttcttttggcactactgcataggcacaacgtgtacctgtaaaaccagcagttttagagaaggaacggaattcgatagctacttcacgagcgccttcgatttcgtagatggattttacagtgtcttctgtgctgatgaaagcttcgtaagcggagtcgaacatcaagatagcgtcgttttctttacaccatttaatccattcagctaagcgtgcacggctaagtactgtgcctgtaggattgttaggggagcaaagatatacgatgtctacgcgttcggaaggaaattctggggagaaattattttctgcaaatgtaggaaggtatacaactttttcaaacataccatcaacagcctggccagtgcgaccgcccataacattggaatctaggtatacagggtatacaggatcagtgatagcgatgatattatcttcactgaataactcttgaatgttaccaacatcggattttgcgccgtcagaaacgaatacttcatccatgccgatttcgatgccatatggtttgtaatcgccttcgatgattgctttacgaaggaaatcataaccttgttcagggccataaccgcggaatgtttcagctttgcccatttcttgaacagccttagtcatagcatctacgatagcaggtactaaaggcaatgtaacatcgccgataccaagacgaataatgtcagcatctggatgagccgcttggtaatcggctacttttttagcaatgttagcaaataaataagaaccttgtaggtttaaatagttttcattaatattagccatgatgactcctttttataattagaattctctatatatagtaaagtatataagaaaatggtgcaagaggtttctatagaatttaaaagaagatactatagggtgtttttggcccatttaattgtatataatgatataaaaggaaggcttattatttgttgttgtcggaggtgtgttgtggaaatgagtatgaaagacgcttttcgtgtagtatttgctgatataaatcgagaagaaaagactaatattttatcggataattgtactccacaagaagtagtgggaaacttttataaaacatccattttgaattatcgtggatatgttacgggtgaaaagaaagaaaagagaaatttatacacggaacaaattgcaaagtccattttagaaaatgatttattaactgaatggaattctttagtacctgttagaacaaatcattttgtacctgatcacaggaagaaatgtgaatgtattatttcaacaaatcgtaaagaagaaatattagctaaattattatacagacaaggtgatgtaggtgggttaggaaagactattgattaccaaacaccattaaaaaatgagatgtctgattcttatggcaaaatagatttattatcatacaatgaaacggataatttaatttctataattgaattaaaatacagaccatctgtgagtgatgaaacattattacgttgtatcttagaagcctatacatactataaacttttggcgttaaatcaagtaaaacaaaaactgaatgatgaaaatcagcaagctactttgaatgacactcaggcagaattagtaatattatttgatgaaggtgcattttcagaggatgaaaatggcaatgaaagaaatctaatggtatcgcttgatgagggtaaaactagatatccggataaaacaattaaaacacagcaatataaagaaattaagggcttgggattattaaatgaaaatacccaattatataaattgtgtaaggctattctaaagcaagaagaaatgttaaaacaaatacgatttcttatgctgaaacgtagtggcacgcaaactgctaatcgtttgagagataaggatgataatgattctgttgaatactatgaatattgcacagaatgcttagaaatcataaaggattagttactatgaatattactgtacaccgcggtactcatcaaattggtggtagtgctatagaaattagtacagcatctactcgcattatgttagattttggtaatgaattaagtttagatgaaaagtacacacctataaatctggatatagacggcgttacaaaaggaacgccggattgtgacggtattgtgatttctcattatcatatggatcactcaggccaactaacctctgcactatcagaaatcccattatatgtgggtgaattaagtaaggaaatcgcgctaataggtgctgagtatcaagatagaggtttatacttgcgcttattaggtgctaatacatttcgtgggggagaggctttcactattggtgatatacgtatcagacctttagttatcgatcatagtgctgcggatagttatatgtttgtcattgaagcagaaggtaaacgtgtcttatatacaggtgattttagaatgcatggggtacgaggtcatgtattagaaaagctaattaggacgtatataggtaacgttgatgtattaattacagaaggcacctcattatctcgaaatgctcatgatgggatatctgaaagagaagtgctagacgatatttcttcatatattcaagatggaaaatatgtctttgttatgtgttcctctacgaatattgaccgtattatggggatttggcataatatgccgactgataaggtattaatttgtgacgcgtatcagaaaagaatattagatacggtgattgataatgtgtactataatagttcattgtatcgtagacctgatagtccactagttcttgatataggggcatatcctaaatattatatggataatggatttgtttccttagtaagaggaacagaaaattatatttctcaaattaaaaaattccctaaagatgatgtacgtattatatattctatgtggacaggatatattgaggaaaatctggcgttaaaagatttgctagatacgtatccatcttatatatgccatgcaagtggtcatgtatgtaaggctgatttagttaagtttatcgatatggtcaatcctgatgttattattcctgttcatactgatagtcctgagaacttagagaaaatagcatctcataggagtatttatgtagttgatgataatgagccgtttattatataggacccacttgctttcattttacttataggttataatagtagagcttattaatggtaagcacttcctacccctatgtgtcgataggggcattagtccgaaagaggaggtgattttgtatgaacaaatacgaagtcatggttattgtgaaaccagctgaagaagaagcaactaacgctgtcattgaaaaagtggaagctttaattgctcgtgtaggcggcacagtagaaaaggtagatcgttggggcaagcgtcgtcttgcttacgcagtgaaaaaattcactgacggtttctacgtattggttaatttcgaagctgatccagctgaaattaaagaaatcgaccgtgtgttgaaaatcaacgatgatgtcttaagacacctgattgttaaacacgatgcataattaaagcctggaggagaaaagatgaactctgtacaaattctaggtaatttagctcgtgatcctgaagtacgttttactaaaactggtagagcagtggcgactttcacagtagctgctacgaatacttatattgactctacaaccaatgaaacgaaagaacaaactgctttcattaattgcgttgcatggggcaaacttggtgaagcggcaggtaatcttcgtaagggcagtcgctgctttgtagaaggtcgcttgcaaactcgttcctacgagactcaggatggtcaaaaacgttacgttactgaagtggtagcgaactttgtgggccaatcccttgatatgaatactaattctttcgatggtgggtccaattttgatagtttcagtacaggcggcgatgacgaacacatcccgttctagtgtccgagactcctactaattcgaaaaggaggattcgcaatgagaagagatagaggcagaaagccaagaagaaaagtatgcgttttctgtgcagaccatatcgatcaaatcgactataaagatgttgcaaaacttcgtcgtttcacgactgaacgcggcaaaatcttacctcgtcgtatttccggtacttgcgcaaaacatcaacgcaaattgactacatctatcaaacgtgcacgtgcaatcgctttattgccattcactgcagaataattgatgaatcaaggcggtataaccatttggttgtaccgcctttttgctacataaagagctggttctgtatggactggctctttttcttagattgtggtatattttgcaggaaaacggtgtttctgtagaacaaattgtagctgatgtaaaagcattgctaagttaaaatcgctacagaatataacttatataaatattgtttataaatgaattgaaaagtagtagttcttgctaattagcatagaaactactactttttgaatatatgaatatgagttataaatagtatttataaataaaatattttatagttttttatcaatatgactataaataatagatgaagtagtatataataaaaatagactgacccatttggatgtatgatacagttctactaatttataaatctgtattggttagtatatgaacgtaaacgtgcttttgttggtgtgtaaagggagatttggaaacattgaaaaaggttttaactttggccgtggctttggctgtagtcagcagtggttatctgtgtgaggtaaatggtgccgcagaaccgataaccaaaaaagcgccttccatctcagaatttaatatatatgtgccaaaagagctcaatgaacgtcaaaaagatcttgttgaaatcggacgttatacagctagcggagatcttggctccttgagagaaacgattatttctgctattgaacgcggtactttgacacctcaagaggtaagtattgccattcgtcagttgtactctgcagcgggtttaaagcaaatgaatgcggctcttgctacatttgagcaacttcgcgaagaacgccctgagtttggtgtagattatgataaacttgtgccaaagcgagtgggcttaagtgctctactaggtaatggctcaaatagtacaaatatggctgccaaaattaaagctgatgaagcatcaacagctgtaaaatataatacattccgtattaaaaagccaaaaccacaaaatagaaacagatcacgtctaggcaaacttgatcgtgaactcgtagcagcagcggcattaggtactcgtgttggtaaatcaaatgcggtgtttgctacatctaagaaaagtttaacagagcttggcttgagcccacaacaaattgaatacttagaaaatatgctatctaattaatgatgagcccttgtcttttcataatgacaggggcttttttatattactaattgacgtaaagtaaagcatttttctataataataaggataggtaacaattagttatgtaatatagtactttcagaatagacatataaggagtaacgatgcgtcttcgtagaaaaccgtggattgatgaggctatccgcgagtatgattcacacattattttatcaggacaagaggcttataaaggcagatggagagaggctttttcgcatccagaaagaccattatacatggaactaggcactggtaagggacgattcattgcgggtatgtctgaagcatatccagatgcaaattttgttggttttgaggttcaaatcggtgtaatttactatgcagcacaaaagattttcgaagctcaacgagacaatgcaaaagtatctttatttgatattgcaggaattgaagaaattgtggcccctggagaagtagatcgattttatatcaatttctgtgatccatggcctaaggctaaacatgctaagcgtcgcttaacatatcatacattccttgaccgctatgcacgtttgttaaaagataatggcgaagtacactttaaaaccgataatgaagacttgtttatgttctctctagaggagttcaaaaattgtgggtgggaactcaagaatgtcacctatgatttacatagtacagatttaccgaatgtaaaaacggaatatgaagagaagtttagcgcaaagggacaacctattttccgattagaagcagtgaaaccgactgttactaaggaggcataatatggtgcaaaaaggggaaaagaaggggcacttttgggagaaagtgtttaagaacgacctacaaggcatgttattgcctatagcgcttatggccttgattggtagcattaatatctttagtgccacctatgttgggtcgattacaacagatactggattgttgggctatgcaccgagacatttaggttatttattggcttctgctattttgggtgtccttttgtatcgatttgattatcgtcgattacaaaatgctaaattactgacttggataatgggattgaccgcagtatccttagtggctatatatttggtcggtgtagaggtcaatggtgcgcgccggtggatttctcttggcctattctcgttccagccatcagagtttgctaaattggctgcactcatttggacagcagctaaattggcggataaaccgtgggtaaaacccagatttacatctatgattaaacctaagaagggtttatctcaaaaagaggtagcattaggttatatttttgaacgcgtaagatatatgtgctatatgttgctttggccgatcatatttgctttgctcactattaaacagccggatatggggactgccgtattgattataggtttctcatacctgttaatattcttatctggctttgagaaaagtatatttggcttatctttgatgggggctattgtcgtaggtatttatgctgctcgtagtagttcgtatcggtgggaacgcgttgtatcttggtttgatccctggtcctatgcacaggataaaggctatcaaactgtacaaggtttgttagccgtaggctcaggtgggttctttggacaaggccttctgaatggtacgtcaaagtatttctatctacctgaagcacatacggactttgccttcgctgtttgggcacaggaaatgggctttttaggcggtattctggtcgtattcttaatggctatgtttacgtattttggattccgtattgctaatagagcacgcgatgcttttggtagatggttagccattgggattacgattctcatcagtggtcaagcattcttcaatatcgccatggtttgtggtatgttgcctgtaacaggtgtgccattgccattcgttagctatggtggttcttctctaatgatgaattgtttagctatcggtattttagcaagtattgcgagacgtggcgtagaaggtgttaaaccagtaggtaataaggaaacgttgccgtcgttgcgcgaggaaacgcagagtcggtttagaccgaatagaacggttgaatctaaattaccgggacgttttgtaccaccaaataaacgataatatatgtgttgtgtatgagggaaaattatgaacgattttattgatattcaagaacgcccatcattgggtaaattattgccacttagctttcaacatttatttgctatgtttggctctaccgtacttgtaccgtatttgttgaaagtcgatccagcaacggcattatttatgaatggtattggtacattgctgtacttatttgtatgtaaaggcaagattccagcctatttaggctctagttttgcttttattgctcctgtcagtgcggtattggctgcaggcttgggttatgaggccgctaaaggtgcctttgttgtatttggcttatcctttgttattttatcgttcttagttcgctatattggtatcggttggattgataaattattcccaccagctgcgatgggggctatcgttgctatcatcggtcttgaactagctccagtcgctatgggtatggctggacttatcggtgatcaaaatcttggcatgtctcatgagcaggctatcatagtatctatgttctccttgattgtgaccttgttaggaaccgtcgtattccgaggattccttgctgtaattcctgtgcttatcggcgtagtggcaggttatatcttatctgctatcatgggcgttgtcgatttctccgctgttgaagcggcaccatggttctcgctaccacagttttatggtatgcctgaatttgatatcaatgccatcgtcatgattatgccagcattatttgtagtatttgcggaacacgtgggtcaccttgttgttacaagtaacatcgtatcaaaagatcttatgaaagaacctggcttagaacgttctttattaggtgatggccttgccaatattctttctggtttctttggggctacaccaaatacaacgtatggtgaaaatattggagtactagcaattacacggtgctttagcgtttgggttatcggcggtgcatctatattggctatgattatttccttcgtgggcaaggtagccgctcttattcatgccattccaatccctgttatgggtggtgtatcgattctattgttcggtatcatcgcggcttctggcttgcgtatgctcgtagaacgcaaggtagactatacaaatcctgttaacatgattcttacatctgttattcttgttgtaggccttagtggtgcacagctcgtaattggtcctgttgttttaaaaggaatgggcttggccactgttgtaggtatggggatgagcattgtacttcttatcctacaaaaaacaggtattggtaatgatcaattaaagaaaacggatgtataattgattatacatttaactatatagcaagacttataattaacgcgtagcttttcggctacgcgtttttgtatagtgggcatttatatatatcatagaagcgtgtctattggaaaaatataaatgtctattgtataatatattgtatgaaatgatttgtgaaaggaggtttatatggattatattttttggcttattataggtctcgtattgatggctattgaactagttatacctggtggtattgcgggtcttatcgggtactgtttgtttatgtggggcgtatttatcggccttggtggtacagatatagccttatatgcggtgctcggtatcacgattgtattagtcgtggtattattaaccttctttaatcacttttcaaaaacctggattggcaagctctttaccttagggcaacgatctaccacaaaagctggatatgtgtctaatgatgtattaaaggatctagctggcaaggagggcgtagcgcatacaacattacgccctgcaggtattgctaaaattgatggtaatttggtagatgttgtaaccgaaggggacttcatcgatgccggttcacccattgtggtgcttcgtgttgtaggcggccgcaatattgttagaaagcgcgactaagctttcaccacatcgtcgtatataatggaggttactatggatgtaggtattttaattttgattcccattctattgattgggattatggtattcttgtatgttgtgccattaggcctttgggtatccgcattggcagccggtgttaacgtaggcatttttacattagttggtatgcgtttacgtcgtgtaaatccatctcaaatcgtaatgcctttgattaaggcgaataaagcgggccttgaggttaatgtaaatcaattggaagcacattaccttgctggtggtgacgttgaccgcgttgtagatgcattaatcgctgctgaacgtgcatctattccgttgacatttgaacgttctgctgctatcgacctcgctggtcgtgatgtattggaagcggttcaaatgtctgttaatcctaaggtgattgaaacaccaatcatttctgcagtggcaaaaaatggtattgaacttaaggttcgtgctcgcgtaacggtacgtgctaatattgatcgcctcgttggtggtgctggtgaagctacaattatcgcccgtgttggtgaaggtatcgtaacaacggtaggttcttctgaagagcatacagatgtattggaaaatccagatcacatttctcgtactgtattgggtaaaggccttgatgcgggtactgcattcgaaatcttatccattgatatcgctgacgtagacgtaggacgtaacattggtgctcaattgcaaacagaccaagcggaagcagataaaaaaatcgcacaagctcgtgccgaagaacgccgtgctatggcagttgctacagaacaagaaatgcgtgctaaaacacaagatatgcaagctaaggtagtggaagcacaagctgaagttcctaaagcattggcagaagctttcagaaacggtaatcttggcgttatggattactacaatatgaataatattattgcagacactaagatgcgtgagaatttagcagatggtgaataggagtagctatggactctattttgtctacaatactatcggcctttacgcataatcctatatttgttctagctataattgcttatatcgtgttctcctttttgaaaagctcaaagactgaagatgctgatgagtatgaaacctcaggtgctgaaaagacttgggaggatatggagcgtgaatacggtatttctattgaacgtaaaatagaagaacctccggttaatgctacatctaatgatgctggctatcagtcgtctaatactcagatttcttataatcaatctgcagaacaatctaaaaaagagcaacctaaacaacgagaaggacataaagtatctactagtaaaacggttgcagtttctacattgactgagcgcctagcagaatttaagcgccaaaaagcaatggaagaagtaaagattcctcttgttgatgtagagactcatacgaagcctgtaacgaagaaggctcgcaagtcgtgtcatgatattaaagaaggtatgaaatgggcttttatattagaaaagccgaaggcattgcgtcatagggctcgataatgtatatctgttcctgataaaggcagggttcccaatggtcaccggggtgactattgggaaccctttttctattgctaagactataattagcctttcataataagtgtaataggtgtgtgaatatagttcgcctaaattatgtgaaaggagcgattatatgtatcgcagcgtacgaaatattccaaaacaattattagagaatctatatgttaaagagaaatggaccttacgagatattgccgattatattgggtgtagtgtagatacaattgtaaggcgtatgcagatgtataagattgcgcgacgtgaaacgcgtaaagatatcaatcgcgcaaccttggtaaatttatatgaagtgagtcatactagtattgaagccttggcccgtcgttttaatgtatccactgcgaccatatctaatcgattacatgagtatggactgctgtgtactcatgaccattctatacatagtgtagaaccagatcgtattaaaaaggcttatgaaagtggtaatagtacaactcgtattgcccatatgatggggctttcacgatggaaggtattacatatcttacatcacatgggggtcaatatacgcggtgggcggcgtaaggtgatgcctatcgatgaaatgagctatttgtatagctatcatgggttgagtacaaaggatataggtattgcctatcaactgcaagctaatacggttgccttatatttacgagaatctggtgttgctttgcgtggtaaacggttagaggtagatacgaatgagattagtagattacggatggaaggattatccattgcagctatcgcacgacaactcgaatgttccccgtctgttataagaaaccgattaaagcagcaacaaacttagtaaagacgtagtattgtatggtgtcgtatggtaaatctgtataaacctcaactcattcggtatagaaatttgtagttaattactatatacttagatttatatgatgatgggaggtttattatgttcgaatatttaacattattattaccatttttactgctagggttcatcgccgccggcctatctagaatatctggtgtggcgttatccatgattatcgtaccaaccttgttgatttggggggctacaccactagatgtggttgcgtttatgctcctctttgtagtgtataataatttcacatctgaaacacaagatgtacgccttgattacaaggatctcgtattatttcctaaatggcgcttgttaattcctttagttttgacggtagttggtatcttcattaatccagctattggtattgctgtctttatggcttgctttgtattggaattgctagcaaccgtgttcaaacgcattcctgaatcggaacgtcctgctgttcatcgtgttattgtactttccgttctcagtgctattgtaaccgctattggcgcctatgtaggtcctactattagtggggattactattttggcttagttggtttagccatcttggccattactgcctttgcttggtatgcaggccgtaatcgaaatgcatttaaaggcatttgggaatttatctgggttgatttcggcattttgcttggtttattcggtattgaaagctccaactatccatctgggttgactcgagactataagagttctatggatcgtatgctaccaatgattactgtagtaggcggttatgcgggattgatggttatctttggcgtatatggcatgttctcattgccatcctttattactgccattggtgcggccattggtatacgcttgttcggcttgtacgagttccctaaacgcggcaccttctcttacctagcaattggatttgctatagctgccgttgtatgtttatatctcgtatctcctgtaccaacaggatttgatgcggtcaatacgattatgacccaacctatggttcaataaaaggtgagttttatcatagtatcaatcatctaaacttgttaatgtgagagtagatagttaacataaacaataaggagatgtgtatcgtgaaagataatactactgttgaagtacactctaatgaagttgtagagacgagaccatttccgccattcttgccgaagaatgcaacggttatgatgatgggaacatttccaccaacatctgaaaagcgagccatggaatttcattatccgaattttcaaaatgatatgtggcgtgttttcggtttggtgttctttgatgataaagaacattttagaaaaggggaagaaaaagcatttgatgcggaaaagattaaagcttttttatctcaaattggtatagcttcttgtccaacggtattgaaagctattcgtgagcatggtaatgcatctgatgcgtttttaaaggtagttgagcccgttcctctcgctgacgtattagcacaaataccagattgtactcatattggtacaacaggtggcaaggctacagaaatcttacttagtttattacctgaaaaggtaaaactacctaaaacaggagaaacgactccttttgtttatgaaggtcgagaactttctttgacgcgtttgccatctacctctagagcctatccgttgagtcttgtgaagaaggcggaggcttataaagcattttttaaagcttgtggattagaaacaaaataattgaataatagtaggatacctttgatggtctattttaattggtaaattagagtagaacctatcaaaggtatttttattattaaaaatttacgtaaataggtgatatggtaattcgcttattgtatataaatctatgagagcagtcataattaaaagtgataacaaaaataactatttaattcttgttttttatgatgagaggtctataattaaccaatgtcattatatggttgacaaatattttagaaataggagttgatactatggataaggctaaggaggccttatggacaagatcatttgtcctcgatactttgattaatttcttagtatttttgatttattatttattaattgttattattgccgtagtggcaaaagataaccttcacgccacagccagtcaagcaggcttagctgttggtatatatattatcggtaccgtcgtggcacgattgttagcgggacgctttattagtgtcttaagttgccgaaagatgctgtacttaggtttgtttatttatttggcttcaacagccatgtacttctacacacctaacttgttaatgctcgatagcgttcgattcataaatggttttgcttacggtattacatcaactgcaacaagtacgattattgctgctattatacctcagtctcgtcgtggcgaagggattaactactacggtttatctacttctcttgctgctgcagtaggtccattcttaggtattttaatgcttcacagtcttggctatgattttatcatcgcattctgtgttgcacttatcgttatttgtggcattggcgccgtaattatgaagtttaaggagcctaagcttgatatcgattctgaagctcataagggcattaagatttccgattatattgaacctcgtatgaattctattagccttgtttctgtgcttgtaggctttgcatactctggtgttatcggctttatggcagcctatacaaaagacttagatcttattatggcaggtacattcttcttcgttgtctatgccgtagtgatcactattacaagacctttacttggtattctatttgatatgaaaggggaaaacttcgttttatatccttgtttcgtatctttagcgcttggtattttcttactatccattgctcactctacatggcttgtacttttatccgccgtattcgtcggacttggctatggtacattcatgtctaatggtcaagcggtaactgttaaaattgtaccggtacaccgcattggtgttgctacatcaacatactttatcgccttggatgtgggccttggctttggtccatatatcttaggtgccattaaggaggtagtcggttatacaagcatgttccatgtaactgttgtagtagcccttgttgccttagttgcttattatttattctatggccgttatgtaggcacagataaagatctttccatgaaagcacgtgctgaagaagaacaaattagaaatcgtaaacgtaatggtaaacttgcataaaatgatgtttgacattgggtatacaattttatagagtaataaaaaatgactattcgagcagttgctcggatagtcattttgctatcttatagtattatttttcgatatttacaatgttgacgataacttcaacagcttttttcatatcgtcgatacatgcaaattcatgacgaccatggagattttctacaccagtaaaaatattaggtgttggaatgcccataaaagaaattttagagccatcggtaccgccacgaataggatcgcagataggtgtgatacctgctttttccatggccgctttggcgacgtttacacattccatattgtctttaatgatgtcatacatattgtaatattgatcttttacggagacttcgcaaacttcacggccatagatttcatttaatgtttgacctgcttgtaggaaaaatgcttttttcgcttcgaacaattctttgtcatggtcgcggatgatgtagttcatcttaccagtatctacttgtgtttccatgctcatgagcataaagaaaccttgacgaccacaagtgtgttcaggaacggccgccccaggtaataacgcgtcaaattgcatagccagtttagcacagttaatcatgataccctttgctgtacccgtgtgaaccgatacgcctttgagcgttacagtaccgccagccgcattgaatgtttcatactcgagttgacctaggctttcaccatcaatcgtataggcaaaatcaacagggaattgtttcacatcaaagtgatctgcgccagtaccaatttcttcatcagggccaaaggcacacatgattttaccgtgtttgatttctgggtgagccacgagataggagagggcttccataatttcgcagatgccagccttgtcgtcaccgccgagtagtgtgagaccatctgttacgaccaaggatttaccaatatagttctttaaattaggaaaatcttcgcgatgtgtgaaaatttgatgctcttcattgagacaaatatcgttgccatcatagttttcaataatgcgtggcttaatattttctgcgttatagtcggccgtatccatatgggcgataaaaccaatagaaggggcctttgcatctgtgttagcatttaatgtaccgatgacaaatccgttttctcgattgtagatgacctcatcaagaccaattgctttcaaatcaggaacaagcacattggtagcaaaatcaacttgcgtttgcgtactgggaatcgttgtactttcctcgttagaccgtgtatttatgcttgtgtagcgtacaaaacgttcaaccattggttccataataagcctccttgagagaatatataattagttgataccatagttagacttaattagtcctatatattttaattgtagactagtagtacataaaatgcaaagtctatcgatgcataatatgtaaaaatattcgtattatgcatataaagcaattgaatcgtatataatgccgtgatagtataaaggtggatagatatacgtttgtattttttatgaggaggttttactatgtcggacgaaactcgttctattccgcccgtagaaccggtacttgatcctaaaaaggactacgaagaaattaattcatacgtagtattttggggcctgttctatgcagcaatctttacactggctgttggctatctatgtttgaaaatcggtcaaacagtagatgcctttgctccagtatctgtacttgccatgggtacagcagttattttgaaacggaaaaatgcgtttgctgaaactgtacacattcaagcaatcgccagctctagtacaaacacattagctggggctatgttcttcttgccagccctttacatttggggtgtaacagatgtaacctttacacaaatggcaattccaattattctcggtggcgtacttggtgttctattatgcgttatgttccgtcgctattttgtagaagaaatgcactatgtgtatccattcccaagcggtcgcgctgcagctgaagtattgatgagtaatgaaggtagtaaagctaaattgatgttaggttctggccttattgctctcgtatatgactttattctaaacagccttggctggtgggaagaggtcattcgtacagctacgtttaaatggggcgctgccttagcagaccaaactaaattgacggctgccgtagataccgatgcagcattgctaggccttgggtattttacaggccttcgctatgcagcgattattgcggctggttcattcttctcttggttcgtatgtattccaattgtatacttcttagcgccagaacatgtgatgcacatcaatggtcaatctgtatttttagcggatgctccaattcgtaaggtattccttgattatgtgcgtcatattggtatcggtatgcttgctatggccggcatcattggtcttttgagtatgtctaaggtggttggcagcgttgttaaaaaagcagttttagatatattcacatccaaaactacagaagttaacttgctccgtacgcaacgtgatgttcctacatcttggattggtgcaggcatcttgttatgtactgtgttatttgccgtatacttccactttatgtattctgaaagcctcgcgcaaacaggcgtagcattcttaatcgttctaattatgtccttcttacttgctgtagtaggtattagctctattgcgtatactggtacagaaccggtatccggtatgacaatctttatgattatcatttctgctgtatgcttaacagctgctggtatgactggtaaagtcggcatgattgcagtcctcatgatggcatcctttatcggtacaaccatcggtatggccggtaactttatgtcagaacttaaggtagcgcacatgacaggtgctacacctaaaaaaatggaacaatggcaaatcgttggtaccattctctgtgctgtactttctgtaggtgtcatgatcttattaaatggtgcctatggtttcgtaggggaccatgcattgaatgctcctcaagcgaatgcaatggctgctatcattgaaccaatgatgactggtggtagtgcacaatggcctttatacatggcaggcgcattgtttgcaatcatcttatggatggtgaaagttccaccgttggcatttgcattaggtacatatctacctatggaaatcaacaccccattactagttggtggtttgattgcatactttgtacaaaatagtacaaacgataaagcgttggcagaccttcgcttctccaaaggtagtacaattgcatctggtcttgtagccggtggtgctattggttccttgttcagtgccgtacttcgtattgcaggtattgatgtatttgctcaagaatgggtagaaacaccagaagcaacatacctcagtattgtaatgtacttgttactctgtgcattcttgtacaaggtagctatgtacattaaagataaaaaaacagctaaataatatgaatctcatctaatgggattgcgaataacgctctctatgaatataattcgtagagagcgttttctatatggagatgattgggggattgtctttgatatatagatataatctataccaaataaaacatatttatatagtaggaattattgacctaggatatatagggtgatatgatatgtttatgttatcattgctaaagtaaccggtgaagactatgatgcggcgccacttggtattgctgtgaaaaaaggtaatacagagttacttggtaaaataaacgatggattagccaaaattaaggctaatggtaaatatgcagagatttataaaaagtggtttggtaaagaaccacctgcagaagatttgaaataggtgatagaatggctaaacggaaagcatttttgaagattgtaaaggaaaatggacctctagtactagatggtgcattcggtacagaattagaacgtcatggatgtaatattcatgatgagttgtggtcgtctaagatgcttattgaaaatccagaaatcatcaaaaaagtgcacatttcctatttggcggccggagcagatattattgaaagttctggttatcaagcaactgtagccgggtttaaagctcatgggtatggtacagaagaagcactagatttggtaaagttatccgttcgtttagccgtgcaagcacgtaatgaatttttagaagctaaagcgaatgatgcgcttacattgcgtggcattacattaggtgaacaattgccagatggcagtgtccgttacttctctgaaggggccttaccaaaaccattggtagccgcttctgtcggaccttatggtgcctttctagccgatggctctgaatatcgtggtgattatggtgtacaaaccgaatatttggaagtattccatattcctcgtatagcattattttgcgaagaaaatcccgatgtgttagcctgtgaaacggtgccgtgctatgatgaggccattgccattgcccgtgccttgtgtgatccgcttacgacaaaaggcattcctgcatggatttctttctcttgcaaagatgaacatcatatctcaagcggagagaccatcattaaatgcgctgaaatgatcgataaggtgcgtcaagtgacgggcatagggattaactgtacagcgccggaatatgtagaatccttgattaaagatatacggtctgtaactaataaaccgattgctgtctatccaaatcttggtgaaacctatgatggagaaaccaaaacatggtcaggtggacaacaaagctttatcgactatgttgatgtatggcgcaaagctggtgcgaatataatcggtggatgttgccgaacaaatcctgatatcattaaagaagtagcaaaacaaatacatgtaaaataaatgagagggactgtataagtacagtccctttttgcttgtatatagaaaaagaaggtcatccatcggataaccttcttttatgtggcggagagacagggatttgaaccctgggtacggtataaccgcacacatgatttccaatcatgctccttcagccgctcggacacctctccatgtattctgttgtgtaacaggtacttgtatagtatatgaaaaagttagatttatgtcaagaacaaaatagtagaattattatagtttcataagagttttaaaaagccgccccgaaggacggcttttagtatgtatattataatacttctttgatttcttgtgcatcgatggatgctttgatatcgtctgccattttttcgattaatggaatatcttcttctttcaaagaggatttgatatcaagaggttgggatacgatttcaatatctttgaagtcgttttcgaaatgagcaaccattgttttcattgcagcggaagcccaggaatggttaccgatgatggataccttatgattttggaagttaagcgcttttaactcgtggatgaagttttccatagtaaggtataggttcaagttataagttggtgcaattgttaccaagtttgtatatttccaagcatcagcgatgatgtaggaagcatttgttttggaaacatcgtagattttaatatctgtaacaccgcgtttagacaattgtttagccaattgttgagcgatgtcacgagtgttgccatacatggaaccgaaggcgataacaacaccttttttctcagctgtgtagctggaccagtgtaagtatttgtgcaagatatattcaaccgtttcaggtgtacgccagattggaccatgaagtggagcaatgcgtttgatttcaagaccggaaaccttgcgaattgcattttgtacttgagggccgtatttaccaacgatgtttgtgtagtaacgacgagcttcatcttcataggttgctacgaaatcagtttggtcagcaaagatgttgccattgattgtaccaaatgtaccgaatgcatcagcagagaacaatgtacctgtagatttttcataggtacaagttacttctggccagtgaaccataggcattgtgtaggatacaagagtatgtttacctaagcaaatttcgtcgccttcttttactgtgtaatattgatcaggctttggtgtgcggtagaattgttcgaacatgcggaatgttgttgcattaccaaccattttacaatttggatagcgttccaatgtttctaacaatgtttgacagtggtcaggttccatatggtttacgatgatgtaatcaagatcacgaccatttaaaaggtgggataagttgtcaaagtattcttcgcgaatttctgcatcaacagagtctacaacgcaagttttttcatcatcgatgaaatagctattgtagcttacaccatttggaatagggaataagttttcaaaacgttcagttgtccagtcattactaccaatccagtagatattatgggtcattttttgagcacaatgcatagtaatatcctttccttacacatatgtatatacataactaacctcatccatgtgatgacggtttaattaattatattgacatcttataatacagtttttttcgaaaaaaatcaatatatcgatatatgtcaatgtgttataactgtgataactttcacatattagaatgtgtattgtgaaagtttgtaaatatagcccattccgaagaatgggccatatagattatttaaagtattttacgccggatgtgaagattggcatttctaagttgcctggaatatttttactaatatctgcaccacaacgttcggagtgtgccattttaccaaatacgcggccatcagggctataaatgccttcgatagcagctacggattggttagggttaaatcgtccatccatggatgcaataccgtcaaagtcgacatattgtgtagcgatttgaccagttttattgaattccaatacttgttgtggggaggcgataaagcgaccttcaccatgagaaataggaaccgtataaatttcgccagccttagcttcacacatccaaggcgattttgtagaaataaccttagtgttggccatacgggatacgtggcgtccaatggtattgtatgtcaaggtagggtgatctgccgttaatgtttcaatatggccaccaggcaatagacctaatttaatcaacgcttggaaaccgttacagataccgagaactagaccatcttgtttataaagtaggttttcgaggccttctgcaagatatgggttgcggaatagggtagccatgaatttaccagacccatctggttcatcgccgccgctaaatccaccagggaacataagaatttgagactctgctaatttagctttgattacgtcaatagattcttttaattgttctggcgtttgattacgaattagtacgatgtctgcaatagcaccagctcgttcaaaagcacgagcggaatcgaattcacagttagtgccagggaatacagggataagtacctttggtttagcacctaaggaggtactgcgaggttttgcgtgttgatcgtgaatgtaagctactgcttcaccagtaccggattttgcttccaatgggaatatatcggataatggtttttcgtatgctttttcgatttcatcaagtgttacagattggccgttccattcgatgacaggtttgttttgggtaactgcaataacgcgaacgtcggacaattcaagtaaatggttaaccgctgtaatatctacttctacgatgaaagaaccaatagctggttggaaaatagctcgttctgcatatttgtcgaacttaacgccaattttattgccgagagccattttggaaactgcttcagggatgccaccttggtctactacataggcagagtatacgcgacctttttcaatttcctcttgtaagatatcacaattttctttgaagtgatcccagtcaggtgtatcgttgtacgtacgaggtacatcaaagtatacgagacgatggtcaggaccttttaaatcttggcttacaatatgtttaacaggcgctgttaccgctgcgaaggatacgagggtaggaggcactgttaaatccataaatgtaccactcatagaatctttgccgccaatggcaccgatttcaagttctttttgcgctttgtaagcacctagaagtgctgctaccggtttaccccaagattctttggagtgtaaacgttcaaagtattcttgtaaagtaaggtatgcatcttgacgacgaccaccgagtgccacaagttttgcaacggataaaagcacggcatattgtgcgccatggtatggactccaagcggacaattcaggtacaaagccatgtgtcatgatactagcagttgttgtttcaccgtgaagaactggtaattttgccaccataccttgggtaggtgttttttgatatttaccaccaaatggcatgagcactgtattggccccaactgtgctatcaaagcgttcaacaaggccttgttgagaagcagtgtttaatgtagatattgcttcgagccattgatctttgaaattgtccgcacttgcagaaccacggcggaaataagatttttcagtaggagctgtcactacagcttcttgttgttgactcgctccatttgtatttaagaaatcacgactgatatcgacaattgtttctccgcgccatgtcatgatgaggcgatttgtatcggttacatcggcaacgattgtgcattcaagattttcttcatcgcaatacttcataaatgcatccacatcggttggtgcaatgacgcaagccatacgttcttgggattcggaaatagcgagttctgtaccatcgagaccgtcgtattttttaggtactaagtcaaggttgatggtaacgccatctgttagttcaccgatggctacggagacaccaccagcaccaaagtcattacaacgtttgatgagtgttgttacctcagggcgacggaataagcgttgaattttacgttctgtaagggcattccctttttgaacctctgcaccacatgtagcgagggattctaatgtatgttccttagaagaacctgtagccccaccgcagccatcacgacctgttttaccaccgagtagtacgatgatatcacctggtgttggtacttcacgtcgcacttgattgcgtggagcagcaccgataacagcaccgatttccatgcgttttgccacataacctggatgatagtattctttaacttcgccagtagcaaggccgatttggttaccataggaggaatagccacgtgcggcttcaacagtaattttcttttgtggtagcttgccttctagtgtatcggctagcggtgtgcgagggtctccactaccagtgatgcgcatagcttgatatacataagaacggccacttagaggatcgcggatacaaccgccaagacatgtggcagcaccaccaaaaggttcgatttcagttgggtgattgtgagtttcgtttttgaatagcaagagccattcttcttctttgccatctacatcaacgggaacgatgatagtacatgcattgatttcttcggattcatcaagattagtaagacagcctgcatgacgcaattcttttacagctaatgtggccatatccatgagagaacgagctttcaccttagttgtatataacaaattgcgaccttcagtatattcttctagtgcttccttaattggttctgtgaaacgactctcttcgatagtaatatccgttaactctgtcataaatgtagtatggcggcaatggtcagaccaatatgtatcgaataagcgaatttctgtaatcgttggattgcgtttttctacattcttgtattgtttttgaattaatttgatatctgccaatgtcatagcgagtccatattcgctaatcatattttgtagtgcatcctctgacatttctgtaaaatcgtcgatgatagctacatcttctggctcttctagtttaagtgccaaggtatcaggtaactcgagacttgcttctctagaatcaacaggattgatgtaatattgtttgattgattctttttcttcgtctgtaaaagtaccttctatgacaaatactcttgcacaacgaacggcatgacctgttgtaagtgtgagcatagaaatacattgctctgcactgtctgcacgttgatcgtattgtcctggtacatattcgatagcaaagataaaagcatttgctggaatatctaatgtttctgctactaaatcaacaggtggttcagaaaaaatcaaatgtttagccttttgtaatgcgtcatcgctaagattttctacatcataacgttcatagatttgcacggctgtagctggtacatgtaattcttgctgtaatgtagctaatacatgtgctgcttcattagcgaaagcatcacgttttcttacaaatagtcgttgaatagccatatagcctcctgtaatatgcagaataaatgagttctggtgttgacaagataagtatagtcggtctagacttataagtaaagataatcttacttatataaagattaacgctacttatagatatgaagttttcatgaaggtcataagaccaaaatttcataaaccgtaacaatagcatcttgttttgagtaaaaagtagaatattaataatgtattactatactattagtatataacagaggaggataaaatggcagtatcagcagatctatatagatcatttttaggagttgggttgtatttgtcattttctcgcgctgcaaaagagctaggtgtttcgcagtccgcaattagtcaaagtatcaaacaattagaaggcgaattaaaaatgcctttatttgtgcgcactactaaatcggtagcatttacgccagaaggcaaggaattattcgatacagtagccaaagcattttccattctagataatgggattacgcaattacaagaacgggtgaatcaagcttacgaaagcttgaatattgctgctacagatacactgtgtcgtcatttcttgttgccctattttcataaatggcaattgcaagaaaatcaaattggcttgcatatcataaacagaccgtccccagattgtgtggaaatggtcattaataaagaagtgcagttagctgtagttaatgactacgaaggtttgcgtagcaatacacaattagaagttactaccttggcgagcattcaagatatctttgtgggcggtcatgaatataaaggggcaggcttctttgaccaaggccgcttgctcagtgagcctatgttgttactacaaaagggaacagctagccgtactttctttgatgaagtaacgcatggtgcttgtagtaaaccgcgttttgaattgagtagtgtagacgttctcctcgatcttgtggaaattaacatgggaatcgctatgttgccaagtaatgtggtgcaagaaaaaatgcaagaaggtacggtcgtaaaaattgatacagatattcctgtgccaacgcgagatatcgtacttgttcggtcgcgtctcgttccacaatccgaaggcgctgctagatttacaaatttattgactaatcgtgaagataagcgagacaaagttttataaatatgaattacaaacacactttattctttttttcaataaagtgtgtttttttgttgaccctaagcgttgatttacgttaaaatttaaagatagttatgcggaggtaaaacgaaatggaattattaaaacaacgcattcgtgaagaaggtattgtcttaaacaatcgtgtattaaaagttgatggttttttgaatcaccaaatcgatccacaattatttaaagctattggtaaagaaattgctgaccgctatcgtgatgctggtgttcaacgtattgttaccattgaagcatctggtattgccttggcattgatggctgctcttgaactagacgtgccattagtatttgctcgtaagaaaaaatctattcttatggtcgatgatgtgtatcattctgttgtatattcttatacaaaagaagaaaattatgacattacaatttctaaaaaattcttgccagcaggcgaaaaagttttaattattgatgacttcttggcctctggtgaagcagctatggggcttgctaaacttgtaaaagatgcaggcgatgaagtggttggtatggcaattgctattgaaaagtctttccaaccaggtcgtgaacgcttagaaaatgctggtttccgtgttgaatccttagtgcgcatcaaagaatttaaagataataaatgtgtttttatagaggactagtcctatagttttttgcggagagaggtagaaataatgaacgtaaaagctgagaaatttgatgtactagtagcggacattgaaaaatctggcaataaatggtttacaaaggatgttattgaaggcgatgaatacaatacggttgtataccatggtcgtttagaaattcatggtaattctttacctgtttttatcgtgttggatgattctgtattctcctatattcgtgttgcagttacaacaacgagtattaccgatgcagccattaaaaaagtattgcctaaattgaatgagcttaaccaacaatttaaagtgacaaaatactatgtaaatgatgaggacagcaatatttacactgatatttctgtgccatctacagctgaaacatttgaaccagcagtattggttaatcttatgttagaggttattaaaccgcacttagatgaagttcatccagaaattttgaaaattgtaggacaagcaaaataagaggttagtatgaatcctaaagcattagcctttgataaatttatgaaggcagaagaagtaacggcttttgagcgcaaagattttgatgatgaagacggtacagtcgtatatcgatcctatattaaatcaccgctttgggatatgccgatgttcgtgatcttagataatagtatttacagtgttatccgtttagtgcttggccctgaaaaggtaacagcacagaatatggcggctattaatgcattgatcaatcgtgagaatgcaatgtataaaaactataaattctatattgatgaacaagattctacattgtatttagattgcgtatacatgtgtgctaatgatgagtttataccagagttgatgtatgctttaatgacgtcgattgtggattatattcctgaggctgttggcgatttgaaagctgcttttgaaagcaatgtacaataaaatatgatattccttataagatagtatatcgtgtgaataggaaatagaatacaagggacttccatacctatgtgtggaagtctttttttatcaatgtacattcgtatataataattattattcgtatcatactgtgtgatttttgatataagtactatatagttcgtaatataacgaacaattataaaaattaatataattattattcgaaaaatgattgaccgatacaaattggtctgatacaatttagatacagataaggaggcgttatcatgaagagacatatgaacctaacatccgttactattgtgactatttctgctaacgctatcagtgtgtaaactcggcctttttaggtcgagtttttttattaaggaggaacaatgaaggttggcattatcatgggcagtaaatctgacctagacacgatgaaaaaagcatctgctatattagatgaattcaatattccttatgaaatggtgatcgcttctgcgcatcgtacaccagaggctgttaagtcttttgtggaacgccttgaagcagaaggagcaatcgcctttatcgcaggtgcaggcgctgcagcccatctacctggagtggtggcaagttttacaaccgtacctgttatcggtattcctcttaatgcaaccgcattaaagggcattgattccctcttggcaatcgtacaaatgccgtctggtatgccagtagcaacaatggccgtagatggtgcaaaaaatgctgcattatttgcagtacaaatcggtgctactttcaacaaggaactaaaagaaaaatatgttgcctatcgcaaagatatggctgacaaggttttagcagataatgctgcattacaagcagaattaaataaataattattacataggaggattactatcatggctaatatcgatttggaaaaattaacacttttatacgaaggcaaagcaaaacaagtgtatcaaacagatgacaaggaaacatatatcgttcactacaaagatgatgccactgcatttaatggtgaaaaacatgatactatccttggtaaaggcgtattgaataataaaatttcctcattcttctttgaattattgaaaaaagaaggcgttccaacacatttcgttcgtcgtgaagatgaccgtaaccaaacagtattgacgttgaacattgttcctctagaagttatcgttcgtaatattgctgctggttctatggctaaacgttttggcattgaagaaggtacgcctcttaaacatccaattcttgaattctgctacaaaaatgatgaacttggcgatccatttgctaacgaatctcaaatcacagctcttggctgggctacgcaagaacaattggatagaatttccgaaattactatgaaggttaacgatatccttaaaaacttcttggctactaagaatgtaacattagtcgattttaaacttgaatttggtacacataatggagaagtattacttggtgacgaaatttctcctgatacatgccgtttctgggatgcaacaacaggtgaaaaactcgacaaagaccgtttccgtcgcgaccttggcaatatcgaagaagcttataaagaaatgttattccgcttaacgggcgaacgtgcataacctgggggttattgatgaactacgatccaatttttgacaaatggcatgaagaatgtggtgtctttggtgtgtttgaccgcactgttgacgttgcacgatatgtatactggggattgtttgcccttcaacaccgtggtcaagaaagtgcaggtatcgctattaccgatggtaatgaagtggctctaaaaaaaggtatgggtttattgactgaggctatcaaggaattaccaacattaaaaagccatatggggactggtcatgttcggtattctacaactggctctaataacccacgtaatattcaacctcttgtaatccattatcaaggtggccaaattgcagtggctcataatggcaatttgacgaatgctctaggcatccgtcgtcaacttgaagcagatggttccatttttcaaacaactatggattcagaggttatcgtaaacttaatcgctcgttctaaggctgatacgcaagaggaacgcattgctgatgcggcacgtcaaatcgaaggggccttttccttggttattacaactaatgactctctcgttggggttcgcgatcctcaaggcttcagaccgctttgcttaggtaagactgaacatggctatgtgttatctagtgaaagctgtgcttttgatgctataaaggctgaatttattcgcgatattgacccaggtgagatggttatcatcaatgatcgtggtgtgcgcagcacaatctatgcagaacctcaaaaaattgataaaaaactttgtgtctttgaatatatttattttgcgcgctccgatagtaaaatcgatggccaatctgtatatgaaacacgactcaatatgggacgtgaactatataatgaaactaaatatgatgcagatatcgtcatgtctattcccgactctggcacgacggctgctcttggatatgctcgtgcgtcgggcatcccttttgcagaaggtttgattaaaaatcgatacagtggacgtacatttatcaaacctaatcaagaagaacgggaactagctgtgcgtatgaagctaaatgctatgccagaggttgtaggcggtaaacgtattgtattaatcgatgactctatcgtgcgtggtaccacaagcggccttatcgttaagatgttaaaagaggcaggcgctaaggaaatctatatgtgtgttagctcgccggctatcgaatattcttgtcactatggtattgatacgtcggttcgtaaagaattgattgcggccacacatacaattgaagaaattagagattatattaaggcagataaattacattatctatcaaaagaaggcttgtgccgagctgttagcggcgtgccagaagcggatttatgtttcgcttgtttcaatggcgattacagggtagatgtgcctacagaacaagaggaaggggtcaaatatgtgctcgaataaaacaggattaacctatcgtgatgcaggtgtagatatcgatgccggtaataaagccgtagagttgatgaaagaatccgtaaaaagaacatacacagcaggtgttgtaggtgatttaggtggctttggtggcctatactccttagcaggtcattccatggaagaaccaatgctcgtatctggcacagacggtgttggcacaaaattgcgcctcgctatcatgatggataaacatgatacgattggacaagactgtgtggccatgagtgtaaatgatattcttgtgcaaggggcaacgcctctgttcttcttagactatgtagcagttggtaaacttgatcccgtacaagtcgctgatatcgtacgtggcgtcgctaatgcttgtgaagaatcaggttgtgctctccttggtggggaaacagctgagatggctggtttctatggtgaaggtgactatgatgtggcaggttttgccgtaggtattgtagatcgtcctaaactgattacaggtgaacatattaaatctggtgatgtcattcttggtttgccatcctccggtgttcattccaatggcttctccttggttcgtaaaatcgttttcgaccataagggtttctctatagatcaagatattccagaatttggtaaaacccttggcgaagaactattaacaccaacacgcctatatcctaaagctgtattgccgttgattaaagaaaactatatcaaaggtatggttcatatcacaggtggtggtttctatgaaaacattccacgcgtactaccaaatggcgtaactgctgaggtagattgtgatacatggccacgccttcctgtgtttacaaaattgcaagaatggggcaatgtggattggcatgaaatgtatcgtacgtttaacatgggtatcggtatgattctcatcgtcgatgccgatgatgtagatacggtgaaagctaatcttgaaagccgaaatgaagcagtatatgaaattggtcgtatcgttgcaggcgaaggtcctgttgtcgtaaaaggggcggtatttaatgactaattccgtatctaaaaagcgtcttgctctatttgccagtggtagaggctcaaatggcgaagccttgtacaaggcgatgcaagagggccttatcaatggcgagtttgtcgttattattacagaccacgcagatgcaggtattgtagaacgctctaaaggatggggcattccacttattgctattgaacgtagtcaatttgattcaaagcaagcctttgaacaagctcaattggatgctcttgagccgtattgtgttgatggtattgtgttggcaggctacatgcgtattgtaggggctggtcttattgctcgctatgaacataagattttaaatattcatcctgctctattgccatcctttccagggcttcatggtcatcaacaggctattgatgcgggcgtaaaagtaacaggttgtaccgttcattttgtagatgccggtatggatacaggtcctatcatcatgcaaaatacggttcctgtatatccagatgatacagaggatactttgtccgaacgattattgcccgtagaacatgcgacctatcgtgaagcacttcgcttgttctgtgaagatgcattacgtatagaaggacgcattgtacattatatttaggaggaacgatgattcaaaacgcattacttagtgtttctgataaaacaggtattgtcgactttgccaaaggtcttgtagacttaggggtgaccatctattctacaggtggcacgttgaaagctatttctgatgcaggcgttcctgcaaaggctgtagaatctcttaccggttttcctgaaatgatggatggtcgtgtaaagacgttacatccaaaggtacatggtggcatcttagcgattcgtgataatgcaaagcatcaagccgctatggaagaacacgctattttaccaatcgatttagtggttgtaaatttatatcctttccgcgaaacgattgcaaaaccaaatgtttcattagaagatgctattgaaaatatagatattgggggcccgactatggtgcgctctgcggctaaaaataatgcatatgtaggcattgtggttaaccctgatcactatgatgaaattttagaactgcttagaacaaatggtgcattgacgcaagactatcgttttgcacttgctaaagaagcctttgctcatacagctgcttatgatacggcgattgctaattatatgagtggtgttattggagaaggccctacacctcctgaatatttaagtgcttatgaaaaagttatggaccttcgttatggcgaaaatccccatcaaaaggcagctttttataaagaaattggcaaggctcacggcatgggggcattaaaacaactacacggtaaggaattatcttataacaatatcgtcgatatggaagctgcgtggaatatggtgtgggaatttacggatccagctgcatgtattattaaacatacgaatccatgcggtgccgcaacggcagcaacattgcatgatgcgtatgtcaatgcctatgaagccgattctgtatccgcttttggtggcatcgttgcgttaaatcgcgaagttgatgcggccactgccgaagaaatgagcaagattttcttagaagttatcatggcgccagctttcacaaaggaagctctagatattttggaagcgaaaaaaaatattcgtctcatcgagttatctaagcctgaatctggccaagtaactgtgaaaaaggtgtctggcggtatgctcgtacaaacggaagatgatatcgtagaagaccgtgctaattataaggttgttacaaaggcgcaacctacagaagaacaatggaaagctcttgaatttgcatggaagcttgtaaagcatgtaaagtccaatgctatcttaatttctaacgagaaacgaacactaggtgttggtgccggtcaaatgaatcgcgttggatcggctaaaattgcccttgaacaagctggagaggctgcaaaaggggctgttcttgcatctgatgcgttcttcccatttggcgataccgtagaaacagcggctaaacatggtatagctgctattatccaaccaggtggttctatccgtgatgaagaatccattaaggctgctgatgaagcaggtattgcgatggtatttacaggcattcgtcattttaaacattagaggtaactatgaaggtttgcgtaatcggtaatggcggccgcgaacacgctatagcgtggcgtttatccatcagtccgagtgtagaaaaggtgtatgccgttcctggcagtgcagctatgaaaaattgtgctgaactagtaggcattgattggtctcatacggatcatcttatccgttttttgaaagataataaggtggaccttgttgttgtaggtcctgaagcgcctcttgtggcaggtcttgcagatgcgttgcatgaagcaggaatccctgtgtttgggccttccaaggcggctgctcaattggaaggttctaaggtctttgctaaagatcttatgaaaaaatataatatccctacagctgcttacggtgtattctccaatgtagatgaagcaaaacaattcatcgccaaaacaggggcccctattgtggtgaaagcagatggcctagcagctggcaagggtgttgtagtggcaatgactgttgaagaagctaatgcagcagttgatgacatgctaagcggaaatcgctttggcgaggctggtagtaccgttgttattgaggaattcatggcaggtgaagaagcgagccttcttgcctttgtagatggtaagaccgtagttcctatgattgcgtctcaagatcataaacgtatctttgatggtgataagggtcctaatacaggcggtatgggaacctatgcaccagcacctgtgctaactgatgtattgcgcgatgaagccatgaagaccattttagagcctatggtagcagccatggcaaaggaaggtatgccatatgtgggctgtctttatgcaggccttatgattaccaatgaaggtccgaaggtggtagaatttaatgcacgctttggcgatccagagacacaagtggtattaccattgttggaaggtgatttgggccaaattatgatggcctgtgctacaggtacattacaacctaatatggtgaaatggaaagactcttctgctgcctgtgtcattctcgcttcgaaaggctatcccgaaacctcgtctaaaggcgatgtcatcttaggtgaacttgtacagtatgatacatccatcatttttcattctggtacgaagttagaaggtgaccattatgtcacgaatggtggtcgtgttcttggcgttgtgggactgggtaaggatttgcgaaccgctttagatcgtgcttatgagcgcgttgaccatattacatttaagggcatgcaatatcgtaaggatattggtgcaaaagctttcaaataatacataatcccctatactatgtgcgtatgcatacggtgtaggggatttttattgcctataatttagtatgtacccgtgatataataatatcgatatacatagaaacaccaatgtagatgacatttggtgatgtaatagagtctgttttctttgcaatagcgatataccattatgatttataataaagaaccgttacaactgaatagtcctgtagccttttggcttaatttccccaatgaggaacgtgttttttgggtggatcggcaaagtaatcgtattgttgtaggcgctaaacgtctagccacagttaaagatgatgaggaccgccataattatgcgtatgtattttatggggatactttttttgacacatcaaaggatcctaagtggtcgggaatggggcatgaaatgattgcgttcacccattactacatcgtagaaaatggagaagccttttatttgcatgctggtgaaagtgttagcatcgaagatatagaagtgcttcatattcgtcatgatttccgtgaaactagtgatgataaaggcgattgggaccgcttgatgaatgccatttcagatggcatcggccgtggagagatgacaaaggtagtcgcatcccgtgaggtgcaattcacaagtgatacaccgtttaatgtggcgagtatcttgaccaatttggttgaaaataatccgaactgtttcatctttggttatgagaaggatgggcgcacctttgtgggggcctctcctgaaattttggtgcgtcatcgtggtagcgaaatccttagttatgcactggctggaaccgcgccaaaggatggccctaatgcgtggactaaggaacagttgctaagtgataagaaaaatctctttgaacataatatcgtccgtgaccgtatcgtgaacacgatgaagcaaatcactccagacgttacggtgggggaaactggcattatggagctagctcatctctatcatttacgtactattattactgcaaaagatagcacaaaatctctcgtagaatgggcaaaattactacatccaacaccggctcttggtggtgaaccacgagagaaggcgatggctctcttagaaacatacgaagctcatgagcgcggtatgtacgctgcaccatttggttttatgaaggatatgggggatggcattgttgtcgttgccattcgttctgccttgattatggataatattctctatgcctatgcaggatgtggtgtggttgccgattctgatgcggatgaagaatatatagagactaataataaaatgcgtactattctagatgcattgtaaatggtaaagatctagtgcgaaaaaatatgatgaggaatatatcctcatctatattacggagaaattacatgaatgaatatatcgccgccttggtggatgaattcgcccaattaggcatcacatatgctgtgtttagccctggttcgcgctctacaacgatggccatgctatttagggaacacggtgcttttgaaacctatatgaatattgacgaaaggtcagcaggatttatggccttaggcatcgcaaagacccatagaaagcctgtaattctcgtgtgcacgtcgggctcagcggtagcacattatatgccggctgtactagaagcacaatatagcggtgtacccttgattattttatccgcagataggcctcatacattgcaacatgtaggggctccacaaacggtagatcaacaaaaaatatttggtacagctgttaattattacgaggaattggcagtaccacaacaggagcattactatacatatccgcgcctagtagctcgtaaggcttatatgaagtctatggatgtgaaaaggggaccggtacatattaatgtaccgctctttgagccattggtaccggagttagataggaaacattttgaatgtggcaggcaaccattttctgttgttccggctgctattcagccaggtgatgcatgcactatctatgacctccttgcaaataaaaaagtgcttatcttagcagggccaagtacgaatcttgaggatgccgatgccattcttggtctatctaatatattccatgcgccaatattaggtgatccattgtccaatatgcgtcgtgtttatgatgaacgagtcattacatcttatgatgcattgctttcacaagaggtgtatcgagatacattgcgaccagattgcattttacaaattggtcagatggtcgtatctaaacgcgttcagcagtgggtggcatccatgcaacatatcccaatcatatctgttagccctacaatggactatacaaaccctgcaggaaacacgatcctctttgtacaatcgacaccacaaggtttggttgatgcactgaatatggagatttctgagcttcatgtaatggcaaatgaggtccatgcagaagtcgctgatgaggaactcaatacagttgataatggctatttggctacgtggattgatgcagacggtgtaggccgtaaacaactcgatacagtagctagggaacaagagctatttgaaggatatacgattcatctattacaagaattgttgccgaagaatagccaacttgtggttgccaatagtatgagtattcgagatatggattatttctggtctggtaatcgtcacagtgctattatctatggtaaccgtggcgttaacggtattgatggtaccgtttctaccgcccttggcatcgctacaaatggcatgcctaccgtattgcttacgggggacttaaccttctttcacgatttgaatggcctcgccgtggcgaaaacgcacccattaaatgtaaccatcattgttcacaataatgatgggggtggcatttttgaatatttgccgcaaaagggaacgccgcattttgattatttatttagtaccgcacaaggcctagactatagtggccttgcgacactatatggtatcgactttgtatgtgtgtcgagcaatgatgaattgaaaaatgcgttacaaaactatgttggaacagcaggtgttcacgttattgaaatccccacatctaaagaacgaagtcgggaattacatgcgctatatacgacgattcctacaaacaaggaggaccaactatgagccaatatgcttgcagtattatagataactccctattcaatccagcacttcgcatgtatgtcgatcttggtgagtatcgatatggggtgacgctagctggcgccggtaaacctcttgtgtgtttacatggtttttctgagtctggttatacctgggatggcatcgttgtgccaggctatcaacttatccgtatcgatacgattggacatggggattcggatattccagaggatgagactgccttttctattcctactatgctcaacgatttacatacggtaatttctgccgtggctggtgaaagctattctctcatgggatactccatgggggcacgattagctttactatatgctcttgagtatagttctgaaattgaaaacctcatcttagaaagtggttctgttggcattgaatcagaggtagagcgacaagcgcgtaaagctgctgatgaacaattagcactagctatagaagataatgatggagagtggtttgctactaaatgggctaacatttctatttttgaaagtcaacatcagctttcaccagttgtacaagataagttgtttcaacgtcggtctcataatagtccttatgcattagcggctacattgcgtggctcggggcaaggtgtaatgccctttgtgggtcatcgcttacaagaattatccatgccatctttatatattagtggcgcactagatacaaaatatactacaataggagaagaactgtttagtaatataccaaactgtgaacatgtcatcgtcaatggggcgggacataatgtacatttagaaaagccaggcccatttatgacggtcttagcagattttttatataaggaaaggtaatatccatgagcaaatttgattggaaagtattggatcgtaattatgaagatgtaatttacgaaacctataatggtattgcaaaaatcacgattaatcgcccagaagtgcgcaacgcatttcgccctaaaaccgtaattgagcttattgatgcattcacaattgctcgcgacgatgcagaaatcggcgttattatcttgactggtgctaaccacggccaaggtgaagataaagaggcattctgctctggcggtgaccaacgtgtgcgcggcaatggtggttatgtaggcgatgacaatattcctcgtcttaacgtacttgacttgcaacatttaatccgcatcattccaaaacctgttatcgctatggtaaatggttttgccatcggtggtggacatgtattgcacatcgtatgcgaccttaccatcgcttctgaaaatgcaaaattcggtcaaacaggtcctcgcgtaggttcctttgatgctggttatggtgctggctatttagcacgcatgattggtcacaaacgcgctcgtgaagtatggttcctttgccgtcaatacacggctgcgcaagcttatgaaatgggcatggttaactgcgtggtaccattcgacaaattggaagaagaaacagttcaatggtgtaatgaaattttggcattgtccccaatggcattgcgtatgttaaaagcatccttcaacgcagatactgatggccttgcaggtttacaacaatttgcaggcgatgcaacattgatgtactatacaacagatgaagctaaagaaggccgtgatgcgttcaaagaaaaacgcaaaccagacttcaaacaattccctaaattcccttaatcggaatatggttatcagtccttatgtatggacctgaaccctttacataataagcagtgcgcctctatatgaggcgcctttcttatacgtatatgttttatagtattatggctagctaagaggtgagatgatggaatggttacgatatggaaaacagtactatccgaatcgtatatgtatgaataattacacctatcaggatatatatagtgctgttgtgaacgtggcgacgcgattacaaacactgtcagatacacgtatcgctatagtgtcggataactccgtaacaatggctgtttatctcttggcagccatgctagtccgcaaagaggtactcttattaaatgttcatcttacagcgggcgaaatagaaaatcagttatgccagctgcatattacaactgtgttacacagtgctaagcgatgtggccaagtacctaaatcggtaacgtctatggagttcgaatctatggagtctatgttgcataatgaggaaaaggatatctttgattggattgttaatgataatgatatagcagctatcatgaataccagtgctacaacggggcagtttaaatcagtgccacttcgttggagtcaaattaaggcgcatgtacaagcatcacaagaggtgctaggtaggtctgaacaggacaattggctcatggtattgcccttatttcatgtgagtggcttatctattttgatgcgatcactctacaatggaaccgcaatgacaatcatggaatcctatgatgaagaacaagtgttgcaatgtattcatgatggtcgcatcaatatgatgtctttagtacctaccatcttaaaaaatttggaacctcgcattatacatcatcaattgcgtgtcatcttattgggcggtgagtttataccaagacctctagttgatgcatgtgtggagaaacaacttccgatttataaaacatatggcatgacagaaacctttagtcaaagtgtgaccatgcctgtattattaaatctaaataaactcgattcggtaggtaaacccttgccggggatgaccgtacatatcgtaaatcctgatgtcgatggggtcggggaaatccatttgaatgggcctatggttatgaggggttatattaatcgcgagccgattcatggcgattttaataccgatgatatgggttatgtcgatgaagatggttttttatacatcttaaatcgccgtacagatttgattatttctggaggagagaatatctatccgaaggaaattgaagatactgtgtatgctatgcaaggtgtgaaggaatgtgcggttattcctgtagccgatacgaaatgggggcaggtgcccgcactatttgttgcttttgatgatatagatgcattaggtaccgattcgaaaatgatcgtgcgagactatatttctagtaagctagccaaatacaaggtgcctaaatacattacaattatggatgcattgccacgtaatgggacaggtaagattatgcgtaagtcgttggccgcccatctcgatatgactgcgtcaaatggaggttctcatgaatgatgtattgaactttaaatccataacgacgtatcgtgtggctttgccgttaaagtttgaatttaaaacggctaagggtactgttcgtgttcgtgaaagtatcatcgttcgtatcgaggatcaacaaggctatgttggatacggggaatgtgtcgctttcacagaccctttttatacggcggaaactgttgattccgcatggaaacaattggtggatacctatattctagagttgcgcttgatgcggccaaaaccattaatggcctatattcggcagttacaattttggttaaagcgcgataatatgcccatgacgatagcaggccttgaaaatgctttaattaatctagattgtaaccgaaaaggcgtgaattctgtgtcgtatatcatggggcagtctttagaatcaactatttccaatggcatcgtcattggtgacgtgtccatggatgaactattaggtatcgtggaacagcatgtagccaatggttgtaaacgaattaaactcaaggtatcgcctcgtgatggttatgaacggacacgacttgtgcgtgatgcttatccagaattagccttagctgttgatgctaatcaaagttatacctatgaccagctggatatggtggctgcctataatgatttgaatttactatgcatagaggaaccctttagcatgacgaatttgactacctataaagcgtggaaggaatcgttgcctaattggcctattacgacctctatttgtttagatgagtcgattttatcctatgatgacttatcttatgcaatcgagtatagattaatcgatgtacttaatgtgaaagtaggtcgtcttgggggcttaatacagacgcgagccactattttacgatgtcgcgaagcaggtattccttactggattggtagcatggttgaatcaggaatctcaaagatattacatgttcaacttgctgccttaggtgatacctatatggcaggggatttatctgattctagtcgctattttgaacatgaccttatcaatccagcaattttatttaccgatgggtccatgcaggtgcctaatggtgctggtcttggcgttgatgtattggataatcgtattgaagaatatacagtggagaaacgaacactatgacaatgatagacgcattacaaatcgatcgtgtagagctaaccggacctaccagtgggcaaggggtaatgcatttaactagttatcatgcgcagccacaaggctatctcaatggcggagctaccttggcctttggtgaaattttatcagggatgctcagcaatcaactgattcgagatgatcaatttgctgtaggtcaatcggtaaccgcaaatcacatgcgccctatgaaagccgaaggcgatttgattgctaaaggacagctactcttacaagggaaaacatctcatgtgtggcgctttgatatgtatgatgaaagctatcgcttgatatctcaggttaccgtaacctgtgcgatagtacctaaaaatcgataagaaaaaaagacctctttttgtaagctgatacggaaaagaggtagatgatagcaaaattcgactttggccctacgaagcccgaagggcgtagacagacccggccggtggagagttttgctatcatctacctctacaaacgtatttgctacgaaagaggtctttattttcttgtgattttatagagtgcttcgatatctgggatatcatagatagcccaagttccgtcaccgatgtgcttcataagtactcggatgggagctgtttggtttgttttggtattgtgaatcgttacggttactgtggcggtattgccatcatcttcagaggtaatgttcttgatttccaaatggcgttgtttaaataattcacctcgttggatgcggtctaccatagaaaacgtattggatgtatcttcgctttcaacatctgaatcactactattttgtgatttgaaactatctggatcctctacatatttacgaattacatcatcaagaagggctgggccgaatgttttcgttgctgccacagcggccttgcctagaggtgaggatgtatccacataagtgttgccctcacgggtaacgatgtttttaaccaatgatgttgtatcgatgtgctctaataccgtatctgcatctttgttttcaacggcttcacggatagtttggaacgtatagactggtgtatgagggatataccataagaaataccacatagcgctcagtgcggctatgatggcaataatgattgctattgttaatgcttttgatttcataatgttgctccgatgtatataatacatatattttaacacataaatttctccttctctatagttgtcagcgctttagattataggtataataaagtatattcattttatattcattattaaaatggatgtgtaagagaggagttagaaatgaaagacaaattaatactaaaagctatggtttgcagtgcttttatgtgcagtctaagtatgggaacgatggctgcagatgtgagcaccgatgtaaaagctggggatactgaccgaagtagctggatggatcgtactgatgttggtattggggttcaaggtagtcagagtgatacatatcatgatgcaaaaataaatccagtaccgtataccagaaactctaattcatattatcgtagcactcatagtgctaaaaataaggttaaacctgtacaatattttatagaaacgatacaacctattaagtattacggaaaaaatgactcatccgttttatttgtgcaaggtcgtttagatgcaaatggcggcgaaaagatttctactcatgcttattggaatggtggtgggggatcagaacatgacaatcaggcaaatagccagaatgactatgttgataaaggtgaaacagttcagcatgattctcttggcctattaggaagtattggcgttgggtatcgtcgacttagtaagcatgaacatgcctatataggtgcgaatacatttttggattatgcatttaaaaacaaattatctcgtgccagtattggtttagaatacgttgctggcttgaataaaatcagtaccaatgtatattatggattgtctacaaaaaagacagagccatattattttaatgattcgcttataatagttccgagacaagatgaatttcatgatccaaatgatgggcatccaactggttttaccaagatacgatatgcttatgagcatgtactagatggctataacctccgatatacacgtgactttaagaatgcgcgatgggtttctacatatgtagatgtatatcattggaaaacgaagatccctagcgaacatccaactagtatgtattatattaatcaacataagtggcaatctataaatggtttgaagttcggggctatattaaatgttacgcctcatatttctttagattttggttttaataaaaataatattagttctggtgacccttatgtatctattatgtatacattaggtcagtctaagtatgcgtactttggtggtaaacatagcgaagacacattgactacagcacgttccgagatgctcgataaagtaaaacgtcatgaaatggctgttgaatactattgggagcaaaattatcgagatacaccgtgggatgttttataaatagtataatagttatgtagtctctataataaacaattccatataattatattttaattggcgcttagttttcttaaagaatactaggtgccaattttatttctataaattttggtttaatctggagtatattcaagtatactgaatataaatgattaatatatacgatttttgatgtataattcatatttctatatattttggagagattcatcaaaaaaattagaaaaaagtacttgcattatattagtggctcatgttaatatatacgagtagtcaacgagagttgatacgcggccccgtggtgtagcggttaacatgtcgccctgtcacggcgaagatcgtcagttcaaatctgatcggggtcgccatttttttttacaaaaaacatgcctcggtagctcagtcggtagagcaacggactgaaaatccgtgtgtcgacagttcgattctgtcctgaggcaccatttttgtattccacgcggttgtggtggaatggcagacacgccatcttgagggggtggtgagcgtacgctcgtgagggttcaagtccctccaaccgcaccaaatataaggacctacagttcactgtaggtccttcttttatatctgtatgagcagagttttatgggagagatatgattaaaaaaagtattgccttatgcatgttttcgctagcattgtcttgtcaatctagtttagctgcatcggtagaaagtcaggagtcaagtgttacaatcaaaagtaatataaaatctgaagattctttaacatcggagtttattgaggtaattcctggagcttttaaaagtgttaggatgagtaattcaaaatatccaagagagctttcagatgaagaaattaagttgttaaaagcacaaagccagaaacgatctaaacaacgattagtagaattacaaaagtcagacatgaaggtggagtatcagatttttgatcccctttataatgatcgggatgaaaaggcactcaaacaaatcacacgttataatactttggaaacaaataagcaaggtattggatatggtaatcgagataaaccattacgtatcgtaagcccttatatgagaaaaaatggacacggggaaattaaattaacgaatccagttaatattccatcctacagaacgcgtgcagataagaataaagcatatgataaagaatttaaagcctttctagaaaagaataaggggaaatcttatgatttatatacacctagaactaaagaggagataaaagaatcaatagaggcgttttttaagcccatagagttaattgagtatcctgttaataatcctaaggattacaagttagtttctacgatcccagggtttcctaaacaaatacctagttttgcaaagaatattcatctacatagtaatcctccgttcttgcaaggtggttcatatgtacaactggcttttggtggtacaccagatcaattgaagccttacattgatgaggcaaggacagattctaaagttgtcatttcgaaatctgatctatccaatgtatatgtaaaaaactatgttgattcaaatatggagtatgcagatactttgaaaaccttaatgcctacatcgatagttattgtagaaaatacaacagtacctatgggcaaatatgtacaaaatcaagtggaaaatcctattgagaaatctgttgatgaaatgtatgcattacagaatcaagtgttggctgaatttaataagattaagattgatggtgaggatagcgaagctaagtataaacgttatgtagaaacgcgcaagagagtagaggctgagcgagatagattaaaacctaaaccgacggatacggtaggtttaggtaagaagaaatatcctatttatacagagtcggagaatcgaaaactacagaaacaatatttacatagattctcttttaatgaagattcggtagaaatacctgatgattatgtaatatatttatttgattttggtggtaattggaatcatccatatgcgttaggcgcagcggtgagccctgagaaaaattatattatttatttctgtcagcgcggttaattgtaggtctaatattgtaattagcaggtttaatctctttacaaatgacaattgttaaactaaaaataaattattgacataaattattttaaaatataaaataattgtagacatactggcgtgtcaaaaagggattagagagttcagccagatacaatatgatatagttcgagagatctatatacaaattaagacatgttacgagagagacgagagaagagtaacatgtcttttttgtatgcccaaaaatagatgatggttcactttttgctcataaaaatatcttcattttacacttgattatttgataaatatacttaaaaaataaataaaatattgacgttagaattataaacagatatattgatggtgatattcattttcataaatagagatagagaaaatgatataacaactatagtatgagagctttagaagggaactttcaaatgaataaggtgtatcgagttgtttttaatgtcaaaaaaggatgctacacaagacactcaattacaagaacttcgtgcagaaattgctgcattaaaagcaagcatgacaaaataatataattatagttatagacaggcacctccctatgtattacaatgtaatacacaaggaggtgctttgtatgtcaaatatttctgtgagacttaatgaacaagaagaaacactgtttaaaacttatgcggaatttatggatgaaaccttgtcaacactatttaaaaaagctttactagaaaaaatcgaaaatgactttgatcttagggtgggtcaagaagctttgaaagaatataaacaggatcctgttacatattctgtagcagaaatgcgtgcaaagtatggtttataagctagagtttagtaaacggtttgaccgacaattttcaaagttggataagtcaacacaacgttatatttttaattggttgataaaacatttggataatgtagaaaatccacgatattctggtaaatcgttaactggtaataaacaaggattgtggcggtatagaattggcaactatagagttattgttgacattagtgatacgaattgtgtgattatagcggtagaagtaggtcatcgaaaatttatttataagtagaggtcatattaatgaaatacttacgtcgtgaattaaaccaagtagaaaaggaatatttaaaacaatttggcgaagactccttaaatcgtgttatccttcatgatcctaatacaaaggacaagcaagaggttcaagatacaattgatatattgaaagaagcgatagcaaaaaacaaacctttagaacaagtaccagaggatatgtggaatcttattgaattctaatgtaaaagacacattgcaaattatagcaatgtgtcttttatgttatagattatacagttctggtttacggtccctgaatatattgattttgttgcgaatgtcttcgacaacatcgaaatcaatatctacagtagcaataccttcctcagtattcatttctaatagatttgtaccccatggatcatatacgacggagtgtcccgtactttggacgcgaccaaccgtgccacagccgtttacagcacacacgaataattgattctctatggagcgtacttcattaagtacttgccagtgtcgtaggcgcatagtaggccattgagctggcacaaatagcaattctgtattcggtaatgcggccatgcgcactaattctggaaagcggatgtcgtagcaaataacggtgctacacggaatgccatctaactcaaaatgtgtggtgtgcgtgccacctgcgaagtattgatcttcttttgcgggactaaatccatgcattttagagtactctccaacgagcgtgccttctcggttataggcataggaggtattgaacacaacatcgtttttagcaactgctacggaaccgcctacgatgtttacgttatgctctttcgcaaatgtacttaataatgattttgttcgttctccatttctgtcagcgatgttgattaactcttttgatggataaaatccagtattccaagtttctggtaatacgataatatctggacattcagaaagtgattgagagagtaactcttgaacacgagtatagttatattctacgtcatttacatggacgtccatttgaataatagttaggcgttttttcatagtacatcctttatttgatgaaatggtatcgtttatgtgaaatatattataattaaaatattaaaacattattgagtagattacaatcacgggtaaacaattcgctagtttttactattctccttataaatgatataatataagttattaaattgtgtctatataaagggggacctatgaaacgattttcattggtagtgcttttcacaattgtaattgctacagcgttagcaggatgtggaatgctttcacagcaaacgacagaaaatgaaactaaaacgccacctacacaacaggttacgatggtacatccgtcgggagttccggtgctcatgtatcacaagattggcgatgataaagataatgatgcggttatccgcgaggatttattccgtcagcaaatgaagttcctcaaggataatgggtaccatccattgacgatggatcaattatacgattatgtagttaatggtgcagcggtacctgaaaagcctgtagtactaacctttgatgatggttatgcagatacatactctatcgtgtatccattgatgaaagaatatggttttgctgctactgtatttgttaatccaggcgatgtaggaacgcggcttacatgggaacagctaaaggaaatgaaagacaatggtataactatttctaatcatggattccaacacgtggaaatgggccaactttcaaaagcagcacaaatggaaaatattcaaaaagcacaacaagcgttagctgataagttaggaattacagataatccttggttctgttatccctatggggacaaaaataaggataccgatgctgccacaaaagacagtggtataaagatggcaatggctatgaagtccggttgggctcatacaggggataatccatacaatattttacgtgtttgggttggtaatgccgtagacatcaagcattttgaagaacgaattagcactgaacattacagtgatttataaggagatatacattgtttaaaaagaattgggtaaagttcatcattatggtgttcttatttaccgcagtcacatcaccattcgtggtattgtttggaccatttaataatgtaaaacgtgccgttattggtgctatcttacaatctcgtcatcctcaatatattacatggttattcagcaacgatgaattgcaatctattttggggacagtaggcgttgtaaagagtcaagatttgtttaaatttaatgctcgcgaagataaagacttaaaattggaaaaaattgagtcttctcgttatgtagggtacgtgcttgaaattccagatcctcgtcgtatccaagttgcgacagctgcaaacattcaagaaaaaggggatactacaagtaatattgctaaaatgaatggtgccgtagcggctatcaatggtggtggctttcacgatcctaatggtactggtacaggccgcttgccatatggctttatccttcacgaaggggattatattatcggtaaggatgtggggcctgatgaatccgttgattttgtaggtttctctaaatctggcaacctcattgcgggtaactatgataaaactgaattagctgatatgaaagctatggaaggtattacctttgggccacctcttatcgtagatggtaagaagatgattaccgatggcgatggcggttggggcgtaggtcctcgtacggccataggtcaacgtaaggatggtactgtgttgttcgttgtaatcgacggtcgtcaaccaggttattccttgggtgctaccttgcgtgatgtgcaagatgtactttatgaaaagggcgcatacattgcggctaacctcgatggtggctctagctctacattgtatttaaatggcaaagttgtaaataaaccagccgatttgttaggggaacggatgattcctacggcgtttatcgtgaaataggaggaacaatgaaaccttttacgcgtgtactgagcgcctttgcggtaggtattctactgcaaggaggggtgtatctgtaccttgatcaatatatgtttgcaccgactacggaatttaacgtctctggtgcgtctaaggatgacacgaaaaacttccctgacgtaaaggagggacgtaaatacgtatcttatgaccatcaatttatggctgttgttacagatgaatctcttcggatttataaggctggtgaaagcaagcccacaacggttagtttgaaaggtcgctccattagctattttgactggatgccagatcgtaactacgcaattatgggcctgtatacggacaacaaggttgttatggcccgactcaatgcagatgatccggaacacgaagtagatacagaacttgaagatgtaccaaagggaagtcgcattgttgatgcagcatattccgaagcgacaaatgtggtgtacatgaaggtaaaagttcgtgaaggtgcataccggatttacagaactgatgcgaactatgatacgcgtcgcgtttacatgcaagctacggatattgggcgtattgctgtattctatgatgaagataatttcttctacgataatgctaaaactggcgacatcttcatgtttaatggtatcgaaggtggttggcgtgttatcaacccacctggacgattccgtttgcttggtgtagatactagcaagaccatctatattgctcgtgtcgatgaagataataatgtattaactgtatactctggtaaattaggtgtaggatttaaacctatttataaatataataatccgactaccttgtctgaagtaactatgaatgcggtgaaagaaattattgccaatggcagtgatgatacgaccaaagtaaccgaagataacgataaatcatctaaagactctagctctaagaaaaagaattaatataaagcctttataatcgcaggttataaaggctttatttataaacttatttagttttatacgacataattcaagttgaactcatatatatttcgttataatcggtatatgagtatacgagatgatgatttaacgggcgacgataatacatgagaaaggcggttgtctatgaatatattgtttgtacggctcagttatattggtgatatactgcatgccacagccgccgcaaggtggataaagcaacagtatccggatgcaaaattacattggattgttacacctagcatggctgaactattagaacataatccctatgtagatcatataattccttgggaacgggatgaatatgaggctcattcgaaaaaattacaccttcgtaccatgtggaatatgtggtgggatttacgaaaacgtttaaagccttatcacttcgatatagctgttgatgtacaaggccggcttattacggggcttgtattattggcatctggtgcacctatacggttaggattagggggtactaaagaactgaattggttgtttacgaattacaaatcgaataatcggtcaaaacatgttatagagcaatatcttgacgtagctaaattactgccaagggcattgaaaaaggaagttgttcctaccgagactgaggatatgggcctaatggaccttattgtgacagatgtggagcagcaacaagctaaagctgaagttgagacggtatttacagaaaaagataggccattgattggtttagttcttggttcatcatggcaaacaaaatcttggcctcatgagaagtggcaacaactaattgattccctgtcctatagaagcaattttatatgcttgggtggaccaaaagaagcacaagagtttgaagaattgatgcaacatgtagagaaagaaaatttgccagtttacaataaattaggtaagactactttacgtgaaatggcggctcttcttggtgaatgtgaggtggtagtggcctgtgatacgggtgcactacatatggctgtggctctacaacgccctgtaatagctttatttggccctacaaaccccgcagagtggggacctctgactggaacctataaagtgctacaaaatcatgatatggagtgcttaggatgccgtaaacgaaaatgtccgaagggaaaagcgtactgtatgtctggtattgatccagttatggtgaaggaacatattattgaattattaggtgtaaagaattagacttaaataagagtgataatatataaagttagttagaatacgcattatgttggtcgtctaactagtagaataggagagtatataatggtaaagtttaaaattcaaaaaggcttatcagacgcagaaatgatgaagcaatgggggggaaatgataactttgaagaaactatgatgcaggcggaacgcaatgcagcgaaacctgtgattcatcaaagtcctaagcaaacacaagatgcattttatcgtgagtttttaactgagaaggtggaaacacttatcggtaagatgctgttagacattaaaatggagtattttaaagagggcgaaggggcattctctatccaagtaaaacgagatggcaagaatattgttcttgaaacagcacctaaaaaggtaaaataaaaagtatatttgaaatagaaaatgtatattcatgaatattagattatctttgtcagtcatcaaaaaaagtgataacaagatctgcaaatcaagataattcgttgtactacatcaataaatactgatatactttcgtacataaataaaaattataacgatatgaggattagtttgcttttacattctcattaacatactcatttggtgatgattaaaaatgcaagataaaatctagcatgacgagagtttttggtgattttttttacacttttatatcaaaaatgcatgctttttgatgataaataagcataatatacttgttgacaaagaattttagaagtagtctaatataagtatgttccaataattcctagtatattttacctacataagtaggaactataggaattgttgataaataggtatgagatagtcattgagtgtatgtataaaattacatcaccttactatttcgaattggaggattaacatggctaaaaaattaagaatctgtgaaaccgttcttcgtgacggtcatcaatctattttggcaactcgcatgcgttacgaacaaatggaaccagtgcttggccttttagatgaaatcggttatgaagctcttgaatgttggggcggcgctacttatgatagctgtcttcgtttcttgaacgaagatccatgggaacgtcttcgcaaattaaaagctaatgtaaaaaatacaccactacaaatgttacttcgtggccaaaacttgttgggctacaaacattactctgatgatgtagtggaagcattctgtaaagctgctgtaaaaaatggtatcgaccgtatccgtattttcgacgcattgaacgaccctcgtaacatggaagctgctattaaatattccaaaaaagcaggcgcacacgttcaatccgctatggtatacactatttctccagttcatacaactgaaagcttcttgaaagttgctgaaactttggttgaaatgggtactgattctctttgcattaaagatatgtccggtttgttaggacctgctgatgcatatgatttggtttccacattcaaaaaacgttttggtgaattgccaatcgacttgcacagccatttcacttgcggtcttgcaagcactacatactgggaagctgctaaagctggtgtagatatcatcgatactgctatctccccatttgctcatgcaactagccaaccagctactgaaactatgatcgaaatgttcaaaggcactgaatgggatcttggtcttgaccttgataaatatattccattagttgatcatttccgtaaagtaaaacaacaaatcgctgaagaattcaacttgaaaccagctagcgatgtaatcccagctgttcgtcgttaccaaattcctggcggtatgttgtccaatactcaaaaccaattgaacgaaatgggtatgggcgatcgcttcttcgacgtaatggatgaaatgccacgcgttcgtgaagacttgggttaccctccattggtaactccaacatcccaaatcgttggtacaatggctatgatgaacgttatgatgggcgaccgttataaaatggttcctaacgaagttaaagaccttgtacgcggtaaatatggtgcattgcctggtaaaatttctgacgaaattcgtcacactatcattgatgatgaagaacctatcacttgccgtcctgcagatcttatcgaacctgaattggcaggttacactgaagatttgaactccaaaggttacactggcatcactgaagaagacgtattaacatacgctatgttcccagaagttgcaattaacttcttcgaagctaaccgtcgttaatcttaatattaacagctctacctttttggtagggctgtttttatgtttatacgaattttatattttctcttgctaatcatgagtaaaatagcgtacactataaggagtatctactaattatgatattgaggtaatcctgtgaatttacaaattagaatttggatatccaatgttgttctatttgtagttcctatactaatagcaattattctatttttgttatatttttcagggctacgcattttagcaaatgctggatactatttgcgtatcgagcaagaacaacagtttaaaagtgttagccgtgtggctgagactattaccttttatggtatagacaatggtttaatggattctcttgttaaacctagctatagtttgttagaccctaatgaggtgtatgtagaaattctcgatcaaggaaaggttctgtattcttacggtacacaacagatttataatgaatctgctatcgttggcttgattgatgtaaatcctgagttacaggggattgtctatcagtcaaatcatacctttgtgtacgaaatgcgtaagaatgaaggacgtcatgcatatctatatcatatagctattaaacgagctgtgcatggtagtgatagcttgatggagaccgtttcgttctacattagcattgttgcattacttttgtttatagttacattttttgcaatcaaccgatttgtgacgaagttcattatgattcacgtccgcaatatgacggaatcattgcgagctgctaattaccaaatcgaaatggagcaggagcaacaaaaagaattgcttgcaggtatctctcatgatatccgtactccattaactgcaattaaggcctatgcagaaggcgttcgggatggtatcgcgccaaccgaagagcaacaaaaacgctacatgggaatcattttgaagcgcgctaatgatctagattctatgttggaggaattgttccttattacaacattgaactataaaaaggaatctagaccatcagagaaaatagaattagggaaatacgtacaaggttttgtagaagatcatatagaacattataagtctagaggtcttgaactgagccaacgtgttacagttaaggatgctactattatggcgaatccgcagttattacagcgggttttgcaaaatattttaaataatagtgcaaaatataagatggcagatataggacatagtgttattgatgtcaccgaagatgaaagtcatgtgtactgtgtggtaagtgatgatggccctggggttccgccagagtcgcttgaccgacttatgcgtccgttttatcgagttgattcgtcccgcactaatccacaggaggggagtggacttggtctttcgattattagacgtattatggaaattttcgaaggtcgtgtagtgatagaaaatattagaccacatggacttagaattattttagagttcccgaaaaaaggagaaaatcatgagtgaacatattctaataattgaagacgatattgatattgctaatattgagcgtgattatttgatggttgctggttatgacgtaactgttatgaataatggtactgatggtattgaagctgctttgaacacgccagtagatttaatcattttggacgttatgttgccagaaatggacggctttgaagtgtgtcgcgccattcgtgataaagtgcgcgtaccaatcgtgatggtaactgcacgcctcgatgatattgataaaatccgtggccttggcgtaggtgctgatgattacatcgaaaaaccattctctccatctgtattgattgcaaaaattaaggctatgttagcacaatataaacgacttactgaaaaagatgttgttgatacaaatgctattcaatccggtgatattcgccttgatcctaagatgatgaaagtttgggtaaatgacaaagaagttcatcttaagaaaaaagaattccaactattagaatttcttatgcgtaaccgcgatatcgtattttccaaagaagaattatattcccgtgtatgggggttagattcgtatggcgactatgcaactgtagctgttcacatcaatcgcttacgtgaagaaatagaagaaaatccatctgatagtaaacatatcattacagtttggggcgtaggttacaagtttgtataaaaagcatagctaaattcacttttagttcatggattggtgagctgttgatgttatatatgtttttagggactatcttatagagaaataattgaagttttatatattttttatatactatgctttattttttagagattttgtgtatactataactgtaaggattattatgaagatatacggaaaagatacacttaacttctctctcttaataagttctctctcaacttttccgtcttcatatataactctctctcacagtccttacactctcaaactatatgcaaaagaggtattcattagttaatgctaatgaatacctcttttgtttttttatctttttacatataatttaggaatggtaataattgttatattgcaaatctaaagaattagccctataataattgtgcattgattgtatgcaattaaaaataggagacaaaatatgaatataaaacaatataagaaacagattatagcatgtgctattgcactatgcgtaggtgtaggaggaggttattatttctttggtacaccagcaggtacgcaacagagtgttgtgacaaatcaaactaagcaaacaaaaccgttgactgaagctcgtaatacctatgttgtacaagcggctaaaaaatcaggccccgccatagtgggtattacaacacaagtattccaaaaggatatttttaatcgtaccatttacgcaggtgaaggcgttggttcaggtgttttaatagataatgaaggtcatattgtaacgaataaccacgttgtatccggtgctagcaatggtgaggttacagtttcgctgtctgatggtactaccgtcaaaggtactgttatgggcactgatgaacaatctgatttagctgtcgtaaagatagatccacctaaaaatattcaacctgttgctataggagactccgattctttacaggtaggtgaaccagcaattgccattggcaacccattaggtctggaatttaaaggttctgttacatctggtgtaattagtgctttagctcgtaccattgatgatcaaggacaacgtttcccattgattcaaactgatgctgccattaacccaggaaactctggtggtgcattgctaaatgctgatggtgagttaattggcattaatagctctaaaatttctaaagagggtgtagaaggaatgggctttgccattcctattaattctgcaaaacctataattgattctatcattaaaaacggtaaggtcattcgcccctatttaggcgtatgggctgtagatcggcaaacagcggctcgcaataatgtaagctatgaaggagaaggccttcttattgtgcaattggatcctaccggtcctgtggctcgagctggtattgtagaaggtgatacgattgctcaaatcgatggtaagaatgtaagtacattaatcgaattgaaagagcaagttgacgccaagagccctggcgatacaattttagtatcttatactcataatggtaaaatgaagagcgctcaggtaaaattaggacaatcctcgtctaactaatagttttagaaatagaaaaattatatataaaatcctttcgactggtggaactctagatattatctgcattttccagcacgttgaaagggttttttattgtataaaacattttttacaaggtaccttgcaattcgaggtaccttgtgttattatgtatttgtcagtacatgatagtgaccgtaagagagctttcacattggcaggtaggcacagcctaaagggaggaactatgcaagttcaattaaaaaaaggtgttatggatatgttggtgctagcattattaacacagcaggatcgctatggatatgaaattgtaagcactatttcggaatacatagaaatttctgaaggaacgatatatccattatttaataggctaaaaaaagagaagtatgttgaaacctatttaaaggaatcttctacagggccttctcggaaatattatcatataacagatacaggccgacaggcttataacgagatgagacgagaatggaatgagttttctggcgttgtaaatatcctgttgaaaggagtcgactataatgaataagaaaagttttttagaagcactgcgtaatatcttcaaaaaggcacgtgttgctgatgttgaaagtattatagaggtttatgaagaacactttgctgtaggccatgaaaaaggccttacagatgatgaaattattaaatccttggggactccagaggaaatttatgcatcctatgtagatgctggaattattacagatacgttaaatgaggatggtaatacaagtaaatctgtaaatatgcaagaaatctatgctagatttgatgagtataaagaacgcttattaccacaactgccgggaatggcaaaaaaggcatcgaagacattagttgctattggcagtgcgttagcctatattgtaggcgtacttatattggtgattacgccagctattttatatttattaggtagctcatggcaaccatttgaaaatgtaaccgcatttcctgcgttatctatgataactttagttgcactcgcaggtgtaggcctttttggtggccttacatgtatatttatcggtgctgaacttcgtggtgtacgcgaacgttatttcagcaatgtagattaaggaggacctatgagacgaattataattgctgccattctaactgtaatcagtgctgtaggggtaggtacatcctttgctgtaaatgatttaccaaattttggtgaatggatgaaaaccaatgaacaacagtttagaaaaccacatagacatgatggttctaatatgcatatggaccaacatatgatggatggaaataatcaaatgatgcctcaagatggtatgggaccaaataatggtcaacatatgtaccaaaattgtcaaaaccaaatgatgcctcaagatggtatgggacgaaataatggtcagtatatggatcaaaatggtcaaatgcctccacaaggtccaggaccacaacaatctaatggtaatgcatcacaacaacaaactggtcaaggtgcaccacaaactacacaaaactaaccatattttatgagtccttttctctcataagataatagagaacgtggtcatgaaagtgcattcatggccaccgtagagccatacactctacgtgatacatatgtatcagtatctctctcttacacacaataactacacacaagcaaaaagagctcctcagtgaaggagctctttttgtatctgtttataattttatttgatgtgtttagaaccgcgttctgtcatagctacgccgtctttgcagagagggcattcctctggtttgtatgttggcacttcaaggttaagtaatgcttgtactttttcttttggtacaccgaattcagctttgccgccagaacggttaacgagaagacctacgcctacgatttcaccgccggattggttaactacgttaacaacttcttgtacggaaccgcctgtagttacgatatcttctacgataagtacgcgtgtacctggttcgattttgaatccacgacgcaatgtcataacgcctttttcacgttctgtaaagatagcgcgtgtgcctaattctttaccgacttcgtgagctaataagataccgccggtcataggtccaataacgagttctacgttttgatcgcggaagcgttctgccaattctttacacaatgtttcagtgtactttggatgttgtaacacgttgaatttttcaacgtacatagggctatgtagaccagaagtcaataagaaatgaccttctaaaattgcttgagtatcgataagtaattgttttacttcttgttctgacatcatttggatacactctccatttcttcaataattaaacgtaccgcctcttgtggatgttcagcctgcgtaataggtcggccaataacaaggcgagatgcaccatcctgtaatgcactcgatggtgtagcaatgcgcttttggtcatttgtagctgcgaaggatgggcgaatacctggtgtaacgataaggaaatcaggtccacaggcctcgcgaatcatcttagcctctaaagcggaacatacaacaccgtccataccggattcttttgctagtttagcaaggcgaatgacttggtctgcaattggtaattgaccgccaatagatgtccaagattcgtcatcaaagctcgttaaaacggtaatagccaatagttttggacgttcgatgcctagtttttcagcgctttcacgagcagcctcagcggcagctttcatcattatagggccaccttgaccatgaatggtaattaaattggcgcctaaacgagtaagggaagatacgccatgggccaccgtattaggaatatcatgtaatttcaaatcgagaaatacatgtttgccgtgctcttgcaaatagcgaaccgtttggtccccttcggcgtagaataattccatgcccaccttgtagaaactaacggagtccccgagtgaggacacgatagatttcatcgcatccattgtggatacgtcgagggcgacgattaatctgtcatctgccatgttataacctccatagtacttatatatctaaataattttcacatagaatagggcgtcctgtcaatgaaaatccgttgtgaaagtcggcttaagaactgcttttatacatcgattttcttcgcgttcatgatataataaatacagaagtgaagatgattcctaatacgagttgatatatgtatatcggactgatgtatataatatgttgttaatagctaagaaaggattaccatgttagattttgtagcattggattttgaaacagctaataaatataaaaatagcgcctgttccttagcggttattaccgttgaaaatgggcagattaccaaaaaagcgtatagtcttattaaaccaccgtttatgtcctttgatccagaatgtattgaaattcatggaattgaacctaaagaagtgttgcatgaaaagacatttgatcaactatggcctgctatctatgaaaatcatttgaagggaaaaatcatgattgcccataatgcaaaattcgatatgaatgtattgcgtgccactcttgattactataacattccttggccagaacttgactatgcgtgtactgtaaaaatttctcgtgccgtatggcccgatttagtaaatcacaaattgaacacaatggcggcgtacttaggcatagaatttaagcatcattatgcattggatgatgctgaaacatgtgccaaggttgctatcgaggcagctcgcttgaaaggggcgaactcactacccgaactactttcaaaaataggcgtacctcttgaaccattcatcgatgaaaaaaataaagctgcacaagcagaattacataaagaaccagaaccagagcagatgtcctttttctaaaaacttgctcggttacgatggtaactaatcctgatagaataatagattgttttggaggtagtcatgttaggtaaagaactattaacctatgtggatcatacattgttaagacccattgctacatgggacgaaattaaggtgatttgtgaagatgcattggcctatcatacggcatcagtttgcattccacccgattttgtggcatctgctcataatgcatatcccaatttgaatgtttgtaccgttattgggtttcctctaggctatcaaacgacagaatccaaggtagcggaagcgaaacaagctattgcagaaggtgcatcagaagtggatatggtcatcaatctaggtgatgcgaaacaaggggactttcatgctataacagaggaaatcaaggctcttaaatccgtatgcggtgataacattttaaaggttatcatcgaggcttgtttcttaacgaatgaagaaaagatagaactatgccattgtgtaacggaaggcggcgcagattttatcaagacctcaactggatttggtagtggtggcgctacattagaagatgtgcaactatttaagaagcacattggtcctaatgtacagattaaggctgccggaggcattcgttccatttctgatatgaaggcttatattgcagaagggtgtagtcgtatcggggcgagtgcggccgtagagctcctaaaagatcatttggacaaagaagtataaagaaaaaccacctaggcagtgcttaggtggtttcttagaatggcggtgtaactatgcgcatgtatgatattattttgaaaaaaagagccaatttagcactaacaaatgaggaaatttgctttgtcatagagggctatgtacatggtactattcctgattatcaagtaagtgctctattgatgaccatcgtatttaatggcatgaatgctcgtgaactcggtacgttgacactctcgatggctcagtctggacaaatggtggatttatcgtcaattgatggtatcaccgtagataaacatagtacaggtggtgtaggggataagacgacacttatcattgctcctttagtggccgcctgtggtggtaaggtcgcaaaaatgtctggtagaggcctagggcatacaggggggactatcgataaaatggaatcgattcctcatttgaaagtatccttaagtcaagaagattttatcgcccaagtgaatagaataggccttgccgttataggtcaatcagaaggcttggcaccagccgataaaaaactttacgctttgcgcgatgtaacagggaccgtagatagtattcctcttattgcgtcctctgtgatgagcaagaaactggcatctggcgcacaagccattctactagatgtaaaggtgggcagtggggcttttatgaaaaccatcgaggatgcccgtgccttggctaaggccatggtagatattggtcgtgaaaatggtcgttccgttaaggctgttttgaccgatatggatcgcccccttggtcatgccataggcaatgccttagaaatacgtgaggtcattgatacattaaaaggtcatggccctgaggacttgacccatgaatgtattatcatggctgcacatatgctcgttttgagccacatctgcgactatgaaactgcactcactcgtgtgagagaggcccttgattctggtgccgctcttgaacgtctccgccttatgattgatgctcaaggtggagatagctctgtgattgatgatgaaaacctactcgctatcggtcaatatacatatgatgtgattgcaactcagaccggttttattacgcatatgaatacggaacaatgcggtattgcatcagtcatgcttggtgcaggacgcaccgtaaaagatgggcctattgattatagtgcaggtatcgtgatgcacaaaaaaacgggcgatactattactactggtgaaagtatagcgaccttgtatgcctctgatgaaagcctacttgctaatgcggctaaggcctatatagaggcgattacaattggcgaaacaatgccaaacatagtggataccatccttgatattgtagaatgaggaacagtatatgatggaattagaaattcagaatcttataaaccgtgcgatagaagctcgtgaaaatgcttattgtccatattcacatttcgctgttggcgctgctttattatgcgaagatggcaccatttacgaaggatgtaacatagaaaacgcatcctatgggcttaccaattgtgcggaacgaacggctattttcaaagctgtatctgaaggccatacaacatttaaggcccttgccgtagttgctgatacggaagggccttgtgctccatgtggtgcgtgtcgtcaggtgatggtggaatttaagattcctcttattattatgggaaatttgatgggggatataaaaatagtatctatggaggaactattaccatttagcttttcggagagcgatgtaattggtaaatagatccttctgaagtggaatagagttttgtccagttgttttgattgagtgtagatggaaaactatcgtcaccatagatgagtaggtagacgtctttatctgtaggaagattattgacggatataaatggcataacctctttggcattccatgaaattgtgtttggattaggggccacttcatctggaccaattaatttatagacttcatgaccactatagtaggtaggtgaaacgcgatatctgccactgccttgtacaacgagagcatcttggcttattgattgaccaatatagttactaatagttggactagatgccatatccatttgtggtatagcaatcgtaaaggccagtgtaatataggcaatgcttgtaaccagtgcagttttacatatgaatgaagctcgcttatggcacatgatagccattaatatagctagtggtgttagcgcagggaatgtataggtggagtacttggttgccatacatgagaagaaaaggattattgtgccagcccagactgctaaaaaagtatgaaagggaacgttcgtaaaccaatttcttcggtttgtatatactagttttggcagtaaaatggaccaaggcaataaagcgattatagtaataggaatataatagtaccaaacattaaatttaggatgctctgatactgtggcgcgtaaccaattatggacgccaaaaaagacattaacaaagtcacttccatgtgttgcgtacatatagtaataccaactaccaccaagagttagaaggatgaatagacctggtatgagctggaggcttaataactcgcgaagatctttgcgaatgattaaatatatgagtatgatgagccctggtaataagaatccgataggtccttttgttaatactgcgatagctgatgcagtataagctgatagataatagaacttatagtttttgttgtgctccttatgacgagtatagcccatatagaaactcatcaatgtagcgttaaagaataaacctagtgtcatatctgttataactgctttagcgataatccaatattcagctgatatagatacgataatagcactaagaatagcgatgatatggctgctttgtgcttttacaaagcggtatgctaggaaaacattacaaagtgctaatagactagagaagaaacgagccccaaaatttgaaatgccaaagagtttaaagcctacaatgagttcccagtaataaaatattggtttatcataccaataatgtccaaaaatctgtggagataaatagttgtgattgagtaccatctccttagcagttaaggcataattggtttctacaggatctgtaatgctgagccaagtattgccaataaaatagacaatagaggataaaagaagaactataaaaatatgatagtccttattttttaacatatatttcatcgatttatccccttatattaaattggttagtcactggtgtttttgatttttttataagttgcacacattgttttatatttacaagtaaacggaaaatattatatttagggtgatgtaacatcttatcaataatcgaagaaatatagttttgagaaattttaaataataagtaggtaatgagtatccccatgatgatatcaagtgggtaatggtgccctacaaatacctttgcaaatcctgttacgatagtgcctgttagtagtattgatcccaatcttttataagtggcaaaaatcggtaatgcaatagctgtcatagccattgcatgagtgctaggaaaactagagtcagcagcgtgaggaattagaagatgtactgtatgtgcaataaaaggtctaggttcctgaactatgaatccgataatactgtgagtgattaatataatacctagaaatactacggtatgtatgcttgtttttaaaagtgttttgtccttgtaatagattccaagtcctaataatagaagaagtaatgcagcgaagcaacctgccagatatttaacgatcaatatcatggatatatctagccaagtgtaggtgcctgcgaggttattaatgagttgaaataattcgtaattcatatatatctccttttttagtgatgacttaactgtatgagtacatcataaagggtaaatattacgaaattataacgactggattacgtattgaaaaagattagttttctatcatgactgctaggatatgaccttgtataataaatgaaaaggaggttgctatgttatttaattggtttaaccatttaggtgtacagaaaaagatgataattagcaacttattaattatcattgtaccctttgtagtactaataacttctttggctatggtatggggtgttattcgctatacaaatccagttgcccaccgccaatggatgatgctcgcacctagtacgattcagtcacaagtatttcaattaggacttgagcaaatcaataaaaaactttcgacggaatccacatctataagtgatatcttagatagtagcgccatattagaagcacagggtttaaatatagttattcttgaagataatcaggtggcctattctacatcaggtttagatgtagatggtctattgaagaactttgatagtacgataaatttatcagaacctgttcattatttgaactggcagggcaatcaatttacctatgtgaattcgtatggaacaggactcacaatttatggatatgggcaaattccatttatggccaagagcatggggccagagtcgatggataagaaactcgtcgagggcgcatttggctttggtatcgtagtgatgttggctattattgttggcataggcatctatatatctaatcgcttagcacgatatattttgcgacctgtgaaagatttgaaagcagcagctgacaatcttaaggatggtatagatcctaaaattattacggtcagaacatatgatgaactaggggatacttgcgaggctttcaataatatgcaatccactctgctgaaagcccgagaagaacaggctgtttatgaagagcggagacgggaaatgattgctggcatttgtcacgatatttctacaccgcttacctctgtaaaagggtatgctagcggcatacttgaaggggttgctaatacagaggaaaaacgagctaaatatgtacagcgaatctatgatatggcaggacgtattgaacatttagttaccatgttatctgatttctctaagctagaattaaaacaaattcattatgatcgtcatatctatgtattagatgatttactgcatgaatatgtcgtcagtcgtcagcttgatgaacacgaacatatacatttatatgaaacatatgatgccggtgatgacatgatttccattgatcgggagcagttttaccgcgttttagataatcttgtgtctaatagcttgaaatataggcgtagtgagtctgtagtaattaatatagcaacgactaaaacgactgatggttatagattaagattctctgatgatgggcgaggcgtatctacagaggagctacaccgtttgtttgatatctttttccgcactgatgaggcgcgtacggaagtggccaatggcaatggcataggtctagccattgtaaaacaaattgttgaagatatgaatggtgttatttacgctgaacataatgaaagcggtactggattatctattgtgatggaatttcctcgcataaaggagtaaggtatgggtaaagttttgattattgaagatgatatgggcatctatgaacttgaacgtgattatttggaaattgaaggctttgaagtcgatattgaaacaaatggtatagatggcttgaatagggcacttaataatgagtatgaccttatactacttgatattatgattcctaaaaaggatggatttgctgtttgtcgtgatattcgtaaagaaaaagaaattcccattatcatggttagtgctaagcgagaagatattgataagatacgaggcttaggactgggtgctgatgattatatgataaaaccctttagccctgctgaacttgtagctcgtgttaaatcccatattcaacgctataatagaatacgcaatagcttgaatcttatagtggacgttgttgatcccaaaatcagtgcaggaaatttagaaattatgctaaattcacatcaagtgtttttaggtggatctgaggtaaatttaacaccgcgcgaatacgatattttagtacttcttgcatcgactcctaaccgtgtgttcacaaaagaagaggtttttgaacgtatttgggggattgattcattaggtgagacatctactgtcatggttcatatcaatagattaagggccaaaattgacaaacaattccaagaagaggaatatattgataccgtttggggtgtaggctatcgttttcataaatgggataactacaaaaaaatatagtcgtaaacaatctttgtgtaagattataagaaaaaggctggagcacgtggctccagccttttagcataagataatgaccattagaatgcaggaacaattgcaccttggtatttatcttgaatgaattttttgatttcagggctatgaagagcttccatcaatttcttgatacgagggtcgttttcattgcctttaagaacagttacgacatttacgtaaggggaatcattagattcgatgaacaatgcatctttaccagggttaagacctgcacttaatgcatagtttgtgttgatagctgctagtgcaacatcgtcgatggaacgaggcacttgagctgcttctaattctacgaattggtaaccattagggttagaagcgatatcttgtacagtggataagatattattggagtctttcaatgtgataagaccagctttttgtaataacattaatgcacgaccaccatttgtagggtcattaggaatagcgatttttgcacctttaggaaggtcttttaaatctttgatttgacgggaatataagcccattggttcaagatgaacgccacccacagatactagaggaaggttatgtgctttcgcgaattcgtccatgtatggcacatgttggaagaagttagcgtcgatttctttatcacctaatgctagatttggtgtattgtaatcagtgaattctgtgatttgtaaatcgatattatcttttgctaaaatcggttttacttgttctaagatttccgcatgtggtactgcagtagcaccaatttttaatacttgtttgtcaccgctgctagccgctttgttattatcgctgccgcaacctgcgactaatagcgcaccgccgagaacgactgtagccgctaatgctaaaaatttgttcatacaaacactctccttttcgagaaaattaaatgtaattcgatatgcttatagtactaaattatttcccatcatgcaagtatgtattattagtagttatccataactaaaagttatatagaaaaaggagctgctactcaaaaccgactttggccctgcgaaggccgtaggccggagtcagacccggccggtggaggttttgagtggtagctcctttgcttattgtcttttagtttggttaacggctaataatgagccctatacttaatagtaattggtataacatagcagcaccagcggtagtacccatggctttatctaatttgatttcgtccacatgggtatagaatgttttgatggttttaaatgctgggatgatggctagtaatgcgagtaatgctgggattgggaggactttcaaatagatccaggcacaaatccagaagaagttaaagatataggtgatgctcattaggctgatggcacggtcgcggcctaatacaattggtaatgtacgacggccgtgtttttcatcgtttcgaatatctcgaatgttgttggtgagcatgatggatccaactaatagggtagccggtagtgcagggattaggaatgctagtgaaagttcacgcgtccacgtaaagcctgtaatgaggacaatagcaaaacccatggcgataccggatgagatttccccaaatggtgtgcgagaaattggctttgggccacctgaatacaaaaaactaattaaaatacagatgatgccggccggaatgtaccaccatgtaatggtggctgataggtataggccgatgatgataggtacaatcataagaaccttaatcatagtggagatgagctttggcgtcactgcaccacgggtaagggaaccagcattacctattttttgccccgcatcaagaccagatttaaaatctttcaattcattccataaattggcgatgatttgagccgatacgacggctaaaaatataagaattgtatggaatatggcgagtcctgtgccatgaagtgcaccgaaggcataataactaaatgcagcacctaagatggttggccctaatgcagcggccaatgtgcgaggtctagtgaggggaattaattcttgtatcatactagtgtggcgaaatgccaactcctttctgttagaaatacgttttcttatctctaagtattgtatagtacattaggagaaatgtaaatttggtgcacctatcatgttagtgcaattatatagtataatattatatgtatatttaaaattcttaatgtaacttacttatataattcaattcatatattcatgaggtgagactatgaaaacgtggagtaagaaggtaatgacactagcttgcgcgacctgcttaacggtcggtatggcggctgtagcttgtgccgatacaattgatttaggctatggtcagtatgctaccactaataatggtgtacacgcggtagctgtagatgcgattcctacaaatcctactttcagaacgatggaacaaaataagacccttcaaacagctaatgagcgagctgcaaaatctatgaatgaccgcataaaaacatcctacccaatggtaaaagaggaatttaaaggtactgccttagatgggtatagtttgtaccaattatctggggatagtacattaggtcatcatacaggttggttgcttacatacaatgtaaataaagaggcgattaattatctcgatcgtacagctactcaaattgttaacgtagcaatggccgataaacaagtgaaagcacaatctgttagcgagccttacacaaaatctaatgcagagaagtttatttcaaaaatggccacagttacacttgatcgcaaaatgttagagccacaaatagcaaatttaaatgctactatgcatcgcgatatgattaaaacgatacaacaaagtgctatgcaagatgcgtcgttgtcgcaaaagaatagacaaagtgtgcaagagggcgtagatctgtttaagagagtcatccctaactttacaatgggtgctacagaaatatcatttaaaccatatacatctaagtttggtgctatggccggtatgagtgtgcgcggcagcttaaaatatgatggctttgtattgcctggtagcttaactatgtatgcaatgccacaaaacgatgggcttacagtacaaattttggctaccgaagatacgagccgtgactattggacaggacaattagaatccatgtatggattgaaaaccctaaagggaggcaataaataatgaaaccattaaaaactcttgtgctagcagcttgtttagttggtgcagttactagttttgctggtgcaaaagatgtaaaaaccatagcaggctccatgtctgttccgaatacagttacggtagcaaccgcatctactacagattctgtggatattataaaggatttgcttatcaaggataatgcaaaaccaactacgaataaacggactcgccaaagtaatgaggatgcattatctgcgcttaactatatgggcgtttcctatgatgtatatcaattacaaggggaagataaaaccggccaaaaggacgctttgttagtggccgtagatttgaaaacggcagctaatgcattgtttgataaccctaaggctaatgcgtctgtccttcctgtattagccatactcaataatggtgagttggatccgattacagaacaactcatgttgactacggttaataatctgttgccaaaagaatctaaaacatttacattgccagataagaacgtacccggttccatctatgtaagtgctggtacaggttacagcactgccgttggtgtagttggtgaaagccaaaaacctactacaattactgtagaaaacacagaacaaatggagaaaatgaataatacaaagtatcaaacatataccgtaggttctcgcgtattagttgatgcggaaggtatcaaattcccatattatgcaaaagcggcactcgtaatgaatccacaaaagcctacattgttcttggcattgactagtgatgtacaacgtcaatactttatgccaatctttgcagatgctttcaaatctattaaataaaatatattgaaaaacatcgatattaatgtataataatttctatatgatgtatgtattgtaaaaaggagtcctattatgaaaacaattcacacagataaagcgcctgcagcagtaggtccctattcccaagctaaagtagctggcggttttttgttcgcttctggtcaggtagcgattaaccctgctacaggttccgtagttgaaggcggtatcgaagcacaaactgaacaagtatgtaaaaatattgaagctgtattagccgaagcaggttctgatttctccaaggttatcaaaacaacatgcttcttagctgatatcaatgacttcaaatctttcaacgaagtatatgcaaaatattttacatctaaaccagctcgttcttgcgtggctgtaaaagatcttccattgggcgtagcagtagaagtggaaatcatcgcggaagtataagatggattatatttcattattacaaaaagaaatgcgacctgcctttggctgtacagagccaatcgctcttgcctatgcagcggccaaggccgcatccgtgttggatgagtttcccaaccacattcatgcgcgatgcagtgccaatatcattaaaaatgtaaaatccgtggtcattccgaactctggaggccgaaaaggcttagccgcggctaccgtactcggtgccatcgtaggccatccagaacgagaactagaggtgttagaatcggctaccgatgaagatcgtaagtggttaggcaccttattagatgctaacttttgcactgtagaactagcggaaggtgttgataatctctacattgaaattacggcaaccaccgatgaacatacggcagtggtacgcattgaaaatgcacataccaatattacctatgtgtccgtagatggggacgtgatttctgaaactgttaatgaaattaaagaggctgaaagtagtacttgcccgatgacattcgatagtatctacgaatttgcaaaagctggcgacatttccggtatcttacctagcattaagcaacaggtagaatataatacggccatttcaaatgaagggttatccaatgattatggtgccaatattggtcgattgttattgcttgatgatgaaaccccatctctagaaacaaagtgcaaggctcgtgctgcagcaggatccgatgcacgcatgagtggatgcccgttgcctgtagttatttgctcgggatctggcaatcaaggattgaccgtttcaatgcctatcattacaaccgcggaggagcttggtaaaaccgatgaggaactgtaccgagctcttgtgtttgccaatttgttaacgctttacgttaaatctggtattggtaaactatccgcatattgtggcgttgtatcggctggcattgtaagtgtggcgggtattgcctttttgaaaggcgatagcaaagatatcatcgaagatacactcgtaaatggtcttgttagcctatccggtatcgtatgtgatggggcgaaaccatcttgtgccggtaaaattgccatctccttagatggagctttcatgggctataaacaagctcgccttaacaagagctatcaaaagggtgatggtctcgtagctcactccgttgatgacacgattaaaagtatcggtgtcgtagcacaaggcatgaaagaaactgatgtggttattttgaatgaaatgttaaagcattaattggttttatatacggaaaacagttcgtcctataaccttataaataagaaaacagcgttatgacccatttggttataacgctgtttttctcatattattgtaattttttaggatcctttagtagcaatgatgcgaccagtcccacaataaggaatggaactagtgtcatcatggctgctggtagagaataggtatctgctaaattccctacaaccggtgcgatgatgccgccaattgtttggcttacgccaagggtgatacctgatgcaaatccaatgctcttagctagataagtttgacctagtacaataacagggctgtaactgatggcctttgcagcaccaatcatgagtaaaatcagataggcgagtggcatcataatcgttacagaaaattcagggacttgtgttaataggaacatggatggcaaccaaatcaacagagataatctaatgattttgataggaccgtatttatcgcccaataagccaccgatgtaggtcataaagataccgatactaaagaatacggttaatgcaaaactaccttgttcggggctcgtgccgagttcatgagtccagaatacagggataaatgcattaataacgcggaaattaaccgattggcttagaataatgatgaacaatataccaaaatatttccaataatttttcagtggctgagccgcaactgttggattttcggtggctacggcttggtcgatagtttgggcatgagctacgatacgtggcatgagcagaaatagaacggtagatataataataccggctacggtgaaagctgctaggccatgtgcacctactgtataggcgatagcgccagcaaatagaggaccaaaggcgaagcctgaactaccgccgatggcgaaggttcccattgctttgcccttcttgccacctccgaggcggttcataatttttgctccttcaggatggaaaatggaagaacccacaccagctagtgtggcacatataaggagactttcataagaagaaacaaaacccatcatccccgtactacatgcggataataacgtgcctgctgcgatgagtcgtggctgattgagcttgtctgaaatataccctagcaatggttgtagtaatgacgataatgccgtgttcgctaagataagaaaacctgcttgctccaaggacagtccatacgtatagataaacagcggcaataatgcaggtaatacactttggcatgagtcattaatcatgtgactcagcgtgatgagataaggataatacttttgcatagtaaacctcgttgattgatgatgtagtatataatatatttatattatatactatatgtatacaaataaaacctagataacatctgtattatatgtatctaggtttatctattatatctctatcattatcattttaaatatggcagaggaggagggatttgaacccccgcgccggttgcccgacctaccgcatttcgagtgcggacccttcagcctcttgggtactcctccgtgctttacgacgctctttaaagaaatctttcatcaattggctacattcatcagcgaggatgcctgcttgcaattgtggctcatggtttagtcccggatgggatagcacattaaacagagattctacggcgcctcctttgtagtcgctagcaccatatacaacgcgatcaatacggctgttaataatggcccctgcgcacataggacacggctctatcgtaacatacagggtgcatccagtcaaccgccaacgctttaggctattacaggcttcacggatgacgagaacctcggcgtgagccgttgcatcatgatccagttcacggcggttatgatgacgtgaaatgacttgattatcgtggaccaaaatggcgccaataggaatttcgccaagggcatacgcttttttgccttcttcgatggcaaggctcataaagtattcgtcacgactgcgctcgtccattgtattaagttcggttgaatccattaggtcttttgtcattattgcacctcttaatgtataatatcttacatagagtctatcatattttatcgtatttttgcgaatagatttaatcgttgtgtcagttgcttgtgtgaggctagtatggatattatttggtatatgtttgatatgattggtaccatcgcattcgccgtatcaggcgcacttgtgggtgtgtcccgtaaaatggatattttcggcatggctgtgctcgcccttgctaccgctattgggggcggtgtgattcgtgatgtactattaggctatttcccgccaaactcacttcgtaatgtagtgtacgttacggtcgttctcgtggtgacctttattgtatttgctatttataacagtcgctatcatcgcaatatgatggggcctcgcagtcgcgctagttacttgtttgctgatgctcttggcttagcatcctttaccgtaacgggtgcctccgccggatatacactatatccggacttgcctatatttatcgtattgcttggtaccattaccgctgtaggtggtggcattttgcgcgatatgttagcgcagcgcgtgccttccgtactgaaagaagacgtatatgcgttgccaagcattattggcggtatagcctattatctactggtaattggtgattgggcgggccaagctgtctatggggctttcaccattgtgctggtcattcgtctactagctataaaatatcactggagcctgcctcgtgtcagataataatcggttttatgcgatatatttgccaaattatgactaagtgatataattgtaatattagttatttttttatgattgtatcccttacaacagttgtgaaatggtacgcacaagcgtgcttgataaaggagtttaacctatgtctaaaaaatggttgaaagtagcgttaatggttacggctattgctacgggtacatccattcaagttgatgcggaaactgtgttatatgttccgcaagatgatcgtccagtaagcctacaatatacagttgatactgcaaaggcagcggggatgacggtgttaacaccaccacaaaatttgatttccggtaaaacctacaaagggcaagccgatcaaatctggaattgggtagagcaaaatgcgggccgtgccgatgttatggtattgagtacagataccttaatctatggcggccttgtggattctcgtaaacataatttgccattgagcacattggaaaatcgtttaaaacgcatcgaagcgcttaaggcaaaccataaaaatacacgcatttatggctttggtaccgtaatgcgttccccacgcgctagtgggggtggtacagaaccatcctactatgcagattatggtccaaccatattccaaattgctgcactacaagataaattggatgcaggcacattgacacaagcggaaacgcaaaaattgatgagcttgcaagcctctgtccctgtagaatatctacaagactggttctctcgccgtcaaaaaaatatgcaagtgaataaagacttgatcgatgaagcgcgtaatggtgtctttgcatactttgcattgggccatgatgatacatcccaattgtctcaatccgcattggaaggacgctatttaaatcaatactccaagggcattccacgtacacaatatggcagcttccctggggcagatcaactcggtttattgttgatggctcgttctcgtaccgatgaaagtgcggaaaaacctacgttctccgttatctatccacttggtggtgccggcaaaacattgccaggttacgaagaccaaaccgttgataaaacgattgcggaacacgtagaagccgttggtggtacgatgacaactgcaggtaaaccaactgttcttctcgctgttaatacaccgctttctacgagcacatccgaatctgaaacctttggtaatttcccaatgctttctcaagctacgactgcctttgtagatcgtattcaacaagctacggaacaaggtgtaaacgtgagcattgcggatattgcctataacaatggctctgataataccttgttaggtgctttatataaacgcgatttactctataaaattggcgcttacaatggctggaatacagcaagtaatacggtaggctatgcgattgcacaaggcttattgctacaaactatgtccccagaagggcatcgcgatatgttgacccaacaatatttggataactgggcataccaagcgaatatccgcaaggatatttatcgtatgcaagattccattcgtaccgacaatgtacgctattctggtgatttgaattcaaaattagaagagtatttacaagaacgtgtacaagatttcagtgaaacttatttgaaggtggaccctcgtacagttaaggctacattcccatggggccgtttgtttgaaacggatattactgtttatgataaaccagtagtacctcttcaaaaagaaattcgtatgcaacgggaagcagaagcgaagagacaagctgaagctgcagcagctgctgcggctgcacaagccaatggccaagcacaagccgctccagctgtgccaactacaacaactcaagctgcaccagctgcaacttcgacaacggtagtacatcaagcggcaacttcaccgcgcatcgttccaacaccggccgctgtgcctcaacaataatcgcctatgaaacgatcgtttttgcctgaaataacctatatgcgtggtctctgtatgctcggcgttatcggcattcatgtcggctcctatgcattacaaaatccgttcgttaatttacaactcattagcgtgttggaaatcttatcgcgttttgcagtgcccgcatttttcttcctgtcagcctttggtttgttctaccatacatcggtaaacgatccatttagctacaaggattttatgaaacgacgctttcaagtggtgctctatccttacattgtgtggtccctattctacctcgtctatacaggcataacggcgcacaattttggaaatctccatcctggaccattgcttgtgaacctcttgtttggtaacagtatgtaccatttatattttatggttatactggtatggttctatgtgctcatgccactatggcgtgtgatggtacggtggattttgaaagcccccattccttggcttgtcatcttatttgccatccaattaggtgttgactttatatcatcttatcgattgggggcctgggcgacacaacagtttagcgattctccagccataaaatatctcttcgatatgcgccttaattattgggtgattcattatgtatggatattcctctttggtgctgttgtagctgagcgatatgaaatcgtgaaagactatatgtggcgctaccgatacctattagccacatgtgccattttatcgattttatccatgttgggcgcctattactatgtcatggatgtatggcattatacggtgctcgaagcgatttacacggtacatcagttgagtccaatgggagtgttctatacggcattaggcacattgtttagcttattcctattccaagtgatgcccctcaacaatacgatggaggcgttctggtcacaaattggggatacttcatacggtatctatttggcacatccgttctggttattaatcatgaccggtatcatggccaagtataatcttctatttacagtgcctcacgtagtgctgttgtatgtgatggccgtaggattatcctacttgacgacagtaggtttaaaacaaataccaaagccaattcgaaaatatattcttggcaactaataggcttatacaagtcctgtaagattggtatataactaattacaatagaatccgctcctaccataacttatagttatcggtagagggcggattttttcatgactaaaatgaaaactttcacaatgtaaagtgtgaaaattaatctgtgattgtgctataatacaatcatactgattagagttacaacaagggaaaatgaggtgctcttatgaaagaattaacatattttaacggtgaattcgtcgaaccaggtgcaaaggtaatcagcattgatgaccgtggctacttattcggtgattctgtatatgaagttgtacgtgttacaaaaggtcgttgttttgcattgtcctatcaccaagatcgtctatatcgatccatgcgtgaaatggacattcccgtaaaaatgacgccagatgatttgaccgaacttcacgaaattttgattgaacaaagtgaaatcaaagaaggttacatttacttacaaatctctcgtggtgtagcgccacgtcatcatgcgtacgatcgctctaaacttgaaccacaaatgctcatgtccattcataatctcgatatggatgctgtgaataagttggaatctggtgtgaaagctatcgcattgcctgatgaacgttgggggcatgtagacattaaaacaacgaatttggttcctaatattttggcgcaaacaaaggcggaaaagaaatttgcctatacagcgatgttattccgcgatggcatttgtactgaaggggctacatctaatgtatttgccgtaaaagatggaattatttatacacatccagcggataatcatattttgaagggtattacgcgtcaaatggttatcactcgtgtggcaccttcattgggcatcactgttatcgaaaaagagtttgaccgcgcctttgttgatgatgcggatgaactattctttaccaatacaaccggtggtgtgattccgattataaaactcgacagaaatcctgtatctgatggtaaaccaggtgcagtgactatgaaattacgtcatggtctagaaaaattaatggaagaaggcttggcttaattagcatactataggtatcaatatggtagctatagtggctggtaaggggagctttcacaaagaaaggacatattttgattacattagaacacattagcaaggtctacgaaggtgctaatcgtgtagaagcgctgaaggatattagcctcaccattgaaaaggggcaaatctacggcattatcggtcaatcaggggccggtaaatctacactgattcgttgcatcaatatgctggaatcccctacatcgggctccgttatcgtagacggcacagatttaacgaaattgagtgctagtgaactgcgtaaagcgcgtaaacacattggcatgattttccaacattttaatcttttatcttcgcgcacggtctatgacaatgtagcattcccattggaattgcaagggcttagcaaggctgaaatcaaagaacgcatcactccgattctcgatatcgtaggtttatcggaccgcgtgaataactatccatcccagctatccggtggtcaaaagcaacgcgttggcattgctcgtgccttggcatctaatccaaaggtattattgtgcgacgaagctacatctgcgttggatccgcaaacaacagaatccatcttggaattgttgaaggatatcaatgaacggatggggcttaccattgtgctcatcactcatgagatgaaggttatccgtgaaatatgcgaccgcgtagccgttatcgaaggcggtgttatcttagaagaaggtagcacgctcgaagtatttacaaatccgaagaaaccgactacaaaagatttcgttggctcagtagtaagcgataacctaccaaaagaagcgcttgaacatattgaacttcatgatgactggattgctggtacggcaccattggtaaaattgaagtttaccggccaagccacagatgaacctgttgtagcaggtttagtacgtcgttttgacctcgatgtaagcatcttatttggtggcatcgactacattcaaaacactagtgtaggccgtctcatcgtcattttgaatggtgatcctatgaaggcgcaagaaggactagactatatcagaacattaccaattgaaagcgaggtgatcggttatgtcagagcaagtaattaaattgttgataaccggtaccttggatacattgcaaatgaccgttatctctacgattatggccatgattattggtattccgctcggtgtagtattggtggttacatctaaaggacatattttagaaaatgcagcgcttaataagattctaggggctatcgttaatgcgactcgttccattccgtttatcatcttaatggttgccatcattccgtttacacgtatggttgttggtacgtccattggtacgacggctgcttgtgtaccgttgacattggcggcgattccgtttttagcacgtcttgtagaaacatccattaaggatattcaattcggtgttatcgaagctgctcaatcgatgggggcaagcccattccaaattatccgtaaggtattgttaccagaagcattgccaactattatcgataatgttacggtgcttatcgttaacttgattggttactctgcgatggcaggtgctattggtggcggcggccttggtgatattgctatccgctacggataccaacgtttccaaggggatatcatgctcgctaccatcatcattcttatcattatggttcaagttatccaaatgattggtgatggtttatccaaagcgatgaataagaaataggaggcgttatgagcgtcaatgaaaaattgagaagtgctcaacatgacgagctctttgaaggcattttacaacttcaaactgtagaagaatgttatgcattctttgaggatatttgtactgttaatgaactgaaagcattatcgcaacgacttcaagtggctaaaatgttacgcgctggtgatagctatgaaacgattgtagaagaaaccggtgctagtacagcgacgattagtcgtgtgaaacgatgccttgtatatggtgctgatggatatacagtggtattagatcgattggcagacaaaaaatagtcgtaacatattcatagtaggatataatacataacggtgaccctggtcaccgttattttgtatataggactattgtttttacttatacgaatggtaaaatgatagtgtatgtatgtgagatatgggaggtcgtatatggaatggctaattgcaataaccggattaccctatgaggtaatgatacttatattgcttgctgtagcagggtcctttgcaggctttgtggattccatagtgggtggcggtggattgatatctgtgccggccatgttgctaactaatttgcctcctagcgtggctctaggtagtaataaattgtctagtatctttggggccggtagtgcatcaattacatttttacgaaaccatatggttgattttaggctggttcgtaaactattgccttttacctttataggttctatgctgggtactttggcggttgtatcattaccgccgctatatgttaaaccgattatcatcgtattactcgtggccgttacattatttgtagtctttaaaaagaactggggcgaagtaaatcgcacctctcaagtaatggggcgagcactttatatttgtatggcctttgcccttggcatcggtatttatgatggctttataggccctggtacgggtacatttctcattatgggatttatctttaccggatttgattttcttcatgcttcggcgaatgctaaaattttaaatttcaccagtaatttagcatctttacttgtgtttctatatttaggacacgtcaatattatgtatggtcttgccgctgcggtgggacaagttgtgggcgcctatttaggatcccatttagccattgcgaaagggtcctctttggtgcgtgttgtattcctgtctgttacgacagtgatgttgttaaaattagtgtttgattatatttctaccttgtaggaggtgtgagtatgcctcataaaaatgatgttcaagtggcattgatcagcggtggtacatcgggaattggatttgccacagctaagctattattgcaagaaggttggtgcgtcgttatcaatggccgcgatgaacaagcgggacaaagggcaaagatgaaattgcgccgatattcttcgaaggtgcgctatgtgaaaggcgacgtatccagtgttagcgattgtcagcgcatcgtaaaagaaacggtagatttctttggtagtatttcagctcttgtaacggcggctggatattatgaagaggagctactagccgatgtatctgaatcggcctttgatgaaatgtttggaacaaatgtaaaaggaactgtattcttgtgccaagcagcattgccttatttacgtcaagtaaagggcagtattgttaccgtatctagtgatgcgggcctacaaggcaatgtagcctgctcagtatatggtgcgtcaaaaggtgctatcgtaagctttacaaaatcactgtcccttgagatggcacctcatgaagtacgtgtaaattgtgtatgtcctggcgacgtagatacatcgcttgtagataagcaaattgcccaatcccatcaagatgcggagcaagcaaaagaggagatgggccaacattatccgttaggacgtattgcaaaacctcacgaaattggagaagttatcgcttttttaattagttcaaaagcatcctttgtaacaggtgctgcgtggacgattgatggaggtcttacgagttggtagtgaatagagtgttatctattactaatagtcataataagacagtttatacagggtaaaatatatattattcatttcaattctacattgagaatggtataataatactaatgaacgatacatacattcacaagtggaatccggagaaaaaaggagaacgattatggcagaatataatggcgttagaattgaaccgcttagcgatggtggtcaagatttaaattatcaagttgaacaatttattttctggggcgcaggccgtgctgccgtattggctttgtctccaaaattcagcaatgttgcactatgcacaaatgcaacatacatggtaactcgcattgctcatttatatgatgttgaattacaaacaggtgctgttgtaggtttagtaggtggcttgagcactgctattgctacagctgctatttccttgctcgtaccttttaaagcagtacgtgtaccggtagctgttggtttgacctatgctattggtaaggtagctcatatttggattgaagatggtatgccatccgacatcgaacgctacaaacctatgattgctgagttctatgaaaatggtaaagccattgctggcgaaatcgctcgcgatgcagcagcaagcattccgttcactcaaggccaacgcgatgtatgggctggtattgccaatgaaacaggtcttgcaaaagaacaattagaacaagtatattctgaaaaagtagcacctgctattgaaaaatggaatacggaaacgaaataccaattgcatgataatgcggcagaagcagtagcaaaagtaactgatgcggcaaaagaaaaaatcgatgtagcaaaagaaacattggatactgcaaaagaattggctaaaggtggcgtagaagtagcgaaagcaactactcaagtggctgtggaaaacgcaaaaactacagcgactaaagctgtggaaaatgcaaaagatactgcgttccaagcagttgaaacagtaaaagaaacgacaaaatccacaattaacggttttcgtaagtagttagaaggattggtatgaatccattaaagattatcaaatatggcaagtattttagtgagtctcgattcttggcgtttgccactcgctatggtaaaaaacttgcctttgtacaaaaagcagtggtgttattcttttgcttgcgcgatcaagatacaccaaaatatgtaaaggctattttagccggcgccttagggtatctcgtcctaccaattgatatcattcctgatacgattgcaggccttggctgggtagatgatgtagcagttctcggtattgctttcaaaatcgccaaccgctatatcaaaacatcccacgaagaacaagcgaaaaagctattcccttttggcaactaacaagtacataaaaaggcagtttaatcattgttattggttggactgcctttgtttatttgacaccctttgttaatagatatacaattaaatttgtattgtaataagaaggatgaataaatgtatacagcgacaattaacgtccgtttctatgaaaccgatatgatgggaattgctcaccatagcaatcattttcggtggtttgaaatggcgcgtattgaattccttcgtcacatcggtgtcaccttgtgggatatgatggacgaggatatagtatttccaattatgaatgtatcgtgtaactataaggaacctgctcgattcgatgacacgattaatatagaaacctatttagtcaaaatgacccgtgctcagatggtatttaaataccgcatgcgccgcgctagcgatggtgctctattggcgacgggtgagactaagaatgcctttatgtctaaatcgtctgggaaaatcgtacgattagaggatcgcttttatcaacctattctaaatgctgttgaggagatgcctcatgactaatatagatacacaacgactgcctatcggcgtctttgactcaggtgtaggtggtctatccgttttgaaagttctacaggaacaatttcccaatgaaaacttcatctatataggagataatgctaataatcccgttggcaatcgtccaaccgaggagattacagaaatcgcttgccgtattgccgaaacattacatcaagtacctgtaaaattgatggttatcgcttgcaatactttcaccgtagtggccctcgatgaggtgcgcagtcgcgtcaatgtgccggttatcggtgtatcgcaaggtgttaaaactgctattcgtgaaagcaatagtaataccatcggtatcatggcgacggtggcgaccgttaatagtcatattcataaatatgtggctatggacatcgaccatgaggtttttgtatgggaacaaccatgcccagaactagccggcctaattgaacaaggtcatttgcatgatgacgctgttcgtaaagctactaaggagtacttagcacctatgctagaacgggatatcgatgttgttgtattgggatgtactcatttcccatttgttagccctgtcctgcaggagttatcaggtgaccgcatccgatatatcgaccctgcttatgagactagtgatctagtacgacgtacgatggacagcaatcatttgcataatccatctaccgagaagggccgtagcaccttgtatttcacaaaggatattgccctaggggctgatttgggcgcccaattcttagatactgatgatttttcggtggaattgattacactataaaggagaattcacatgtggttttatgacataataaatgtgatagttgccattgcagttattgtagctattttgtacttattattccgtctattcgtattaaaacaaggtaacgaacgcgttattttgttgtcaaagcggaaaacaagctttcaattggcagatatgaatatgagctccatgacattgttctgcgatgtgccatttgtaaacaaaggccgtcaacttggtacaatcatggatttgttcccacgtcctttgcttccagaagaacattttgatggtgtgaaagtagacgcttgggctatggatatcgatcgtccacgccacgatggttactttgaagctatcatcatcaagcctcgcaagggtggtacaatccgcgtttacgttaccttaactggtagaaatggtaatattcgtgaagatattaaaggattcccttatatggacatcgacatttattaccaaatcgtaggtcgtaccgattaccatatcgataaacaacgtattcgtttgactgcagaagaagtacaagcagcattggttcactaaggaggcataacaatggcagaattagaattagtatgtgttcctacacgtattcttacagataatgatgacatcgttgatgctatcgttgaatttggtggtcacaatattggaccagaagacatcgtatgcgtagcagaatccgttgtggctattacacaaggtcgctttacacgtcctgaagaactcaatgtgtgttggcaagcgcgtatgattaaccgctttatccatccagatggttccatggcttctatttatggtatgcaatctgctatgaacttagatggtaaatggaaggtattaggtgctttcttcttaggcgctattgctaaaattttccgcaaaccaggcgtgttttacgctatcgcccgtgctgcatccttaaccgatgacgtaacaggtacaatgcctccattcgataaacacatcgtatttggcccaaaagatccagataaggtggctgaaaaaatcgttcaacgcacaggttgctatggcgctgttgtagcagacgtaaacgacttgaaacgctctgcaattctcggtacaagtcgcggtattgatgcgaagaaaatcgctaaattgttgattgataatccatttggtaatgatagccaaatgacaccaatcgttattattaaaaactacgcttccgtttcgggagcaaaataaaagattctcgatgtttccggtgcagaactggtaagtctagagattaacaaaagagactgctccggcggtctcttttctgtttaaaggaggatatatgttattaggcatagatgtaggcggcacctttacggatgccgttattatagatgggggtaccatcgtttcatcggcgaagcggcgaaccacgaaggagaatctcatgaatggcataacggatgccttaggtgcggtgatgagtggtgcggaccctgcacaaatagaacaggtaacgctatccactacggtagtgacaaatacaattgtagagcataaagaacagcctgtagatctctatgtagtagcggggccagggcgcaatgtagatgatatattccctgtaagacctgtgtatcttaaagggtacacggaccatcgtggcatcgtggtggaacgtacggatatagaggggactcatcaactagcgaacatggtgcaatctaagagtggtaccgatttggctgctgtatccgcaaaatttggcgttcgcaatccaaaggaagaaatcgatattgctcaggctctatctgacacatatcatacgatttctacaggcagtgcgttaagtggcaatcttaattttccacgtcgcaccatcagtgcttattttaatagtgccgtggcctctgtatttaaggaatttaagaacgctgtttaccacgcattagatacctttcacattacggcacctgtatatattttgaaagctgacggtggttcgctaccgatagagacggtggaatccattcctgtagaaactgtatttaccggaccagctgcaacggtacttggcttggaagcattgcgcagcactaaagacgcccatacggtggcccttgatattggtgggactacaacggatatttccttgtggaaacagggcaaaccactgatgacaaaggagggcgtatccattcgtgaatatccaagtgctgtacgttcctttgcggttacctcggtgggcattggcggtgaatcggcggtgcgctatgaagatggaaaactcatggttggccctgaacggattggcccatctattgcattgggcggtactatccctacattaggggatgccctcatcgtgcttggtaacgcgcattatggcgatgaacagaaggcgtacgatgccattgcacagattgatacgaccattgatgctaacactatggctcaacgcatcgtagatacagcagtccgcattgtacaacaaggcattgacaaggtcgtagcgaaggaaaataaacgacctatctatgtagtggccgatattgtgcatcctgatccatttgtgccggcccagcttgttatcgtcggtggcacggcggctagtttgggccctattattgggggccaactaggattgcctgttcatattccagctgatgcggccgtggctaatgccatcggtgccggggtggctaaccatacgatggcgattacggttcacgtcgatacaaaacgccgtactatggtagtgccagaactgggcattcaagataaaagtagctctttgcgttctgctgacgctgtcgcaaaagtagcttatggcttactgcgcgaggctgctcaggaacaaggtcttgtacctcaaggtacaatgcctgctatagaaacgattagtattgaagattttcctgttgtcgatggatggcaatcgatggaacgcattattactgtgaaagtacaactgaaagcgggggtgagcggctatgtggaatcataaggacagttatcgtgtgcgaaatggaatcgtgtcggctagcacaatagaatatccttcattaggcctcgtatttttccctgcctttgattggaaaatttctgccactcatccagaacggcaagaacggttgctctatacgcgggatcaaatcgtggaagaaggcttattggatgtaccgaatattagagaatataatcctatcgtagctgactgggatgtaatagaacgtgttcacgttggggcccctgatttagcatcttgggtaaccgatgcgcatcgcgtatcggctggtggtgccattgcagcagctgatgcggtgttacgaggtgaagttgatcgggcctttgccctcgttagaccgccagggcatcatgcgatggccatggtacatggtattcgagggttctgtaccatcaatatcgaggccgtcatggtccaacacatacgtcaaacctatggtgtgaaacgggtggccatcgtagatacagatgtacatcatggggatggatcgcaagatgtgttctatcacgatccggataccttgtatataagttttcaccaagatggacggaccttatatccgggtacaggatttatggatgaattcggtggacctcaagccattggtgctaacatagatattccgttgccaccggggacgggtgatgaaggtttattaaaggtgatgcgcgaactcgtattgccgattctacatgaatttaagccggatatcgtcatcaattcagcaggtcaggacaaccatttctctgatccactagccaatatgaatgtgaccgctaaaggctacgcagaactagttgacctattgcaggcggatatagcggttctagaaggtggttattctgtacaagaggccttgccttatgtaaatacaggtatcattttatcgatggctgggttagattacagttgcgttatcgagcccaactatgtagaacaacatcagtcgactgatgtaacgagatatattgatgatcttattttgaaatggaaggaccaatgggcgcgtcgtgaggaaatagcacgagatgaactcatcggctataaggataggtgggtccgtgattattctgtgtattacgacgaatctggtgtacaagaagaacgtcgtgaaacagtgcgcctctatcctgataaaattggttggcatagcatcgaatcctatggtaattatgggccctatgcaaagcaaagtgtgtacgctatgtttattccatggcaagccgatgatgctacgcgcgaagaggcttttacagaagcacgtcgcatgaaagaacagggtggtctcaatcgctatgtagtggtggaccctatgggacagggacaagttgaaatttagcctgtcgaatggaaatcattgttcatgatataatagaataaacgagatagcgcccctcgtgtgaggggcgtttctattgtgatacatatcctataatgaacaattcagcatggtatactagacataaagggggcgttgttatgcgcagtgataatagaacagcaggtcaattgagaccgattaaaataacgagacattttacggaatatgcagaaggttctgtactcatcgaatgtggtaaaacaaaggtcatttgtacagctactatcgaggaaaatgtaccgcgctggctaaaaggttccggtcaaggctgggtgactgcagagtattctttgttgccacgttctacaaaaacacgggtaagccgtgaggccgctcgaggtaaacaaacgggccgtaccgttgaaattcaacgcttaatcggtcgtgcattgcgcgctgttgtagacttaaaggctttaggcgagcgctccatcaccgtagactgcgatgttatccaagccgatggcggtacgcgtacggcgtccattacaggtgcttttgtagcccttgtggatgccatcgattatacatttggcggctttggtaaattccctattaccgatttctgtgccgctatttccgttggcattggcccagaaggtcctattacagacctttgctatgaagaggatagcgctgctgtagtggacatgaacgtggtgcgcaccggtactggcaatcttatcgaggtacaaggcacaggtgaacatggcacatttagccgcgatgaacttaaccaattattagaccttgcagaatctgctactgacgaattgatggctgtgcaacgcaatgtactcggctctgtagcggacaaaattggcaaggtgtatcctgatgcacctgctcaaaccgctgaaggagaacaataatatggaacgtattgtattagcaacgggcaataaggggaaaatacgtgaatttgaacgggccttttctcatatgaacattacctgtgtgcctgtgaaagacatagtggacgttccggaaccagaggaaacgggcacaacctttatggaaaatgccatcctcaaagcgaaatactatagtgaaaaaacaggattgccgtgcttagctgatgattcggggctcactgtcgatgctcttgctggggcacctggcgtatactccgcacgctatgcaggcgttcatggcgatgatgaagcaaataatgaaaaattaattcgcgaattacaaggtaaatcggatagaacggcgcactatgtatgcgctttagctttggtacatccggatggtgctagcgtgacggccgaagcctcttgtgatggtgaaattcaagatacgccagttggtaccaatggatttggatatgatccatatttctttgttccacaatttggcaaaaccatggcggagctcgatatcgatacgaaggaaaccattagtcatcgtggtaaggcattgcaacaattggtagcaaaggtgaacaaatgaaacgaataggtattattagtgatacacatggttatctcgataccattgatctcgcattagatgcaacggtggaccaagatatcgacatgtggctacacgccggcgactacggcgacgatgcgcggtatatgcaaacgcgcaccgatgtgccggtttatgccgtgcgcggcaataatgaccgcgtgcagcccttagagcctaaggaacaattgattcccttagaagatacctatatttacatgacccatggtcatgaggtatcatattgtaaacgagcacaagaattgatacacattggcaatgctatgggggcgcgcctcatcgtgtgtggacatagccattttcacgaggctaaacatataggggataccctttttgtgaatccggggagcattgcattgcctcgggatggatcgggcggtacctttgccatcgtcacctacgaagatggcgcctttgatgtagaatttgtgtataaacaggatattatatagtatatgagtgaaagtcgaggtttgtatgactttcacaaaaaatagtaagtctatgcatggaaagggttatggcatatcatggatacaccagttaaagcaaagcctaaaatgaagttatatgggtttaataatctcacgaagacgttgagttttaatatttatgatatttgttatactcgtacagaggaagaaaaaaagcagtatattcaatacattgatgaagtatacaacgcggaacgtttgacgaatattttgaccgaagtgagtcatattatcggtgctaacattttaaatattgcgaaacaagattacgacccacaaggggcatcggttacgattttgatttctgaagaagaaattgaaaaagaagatgtggttatgcatttggataaatcccatcttacagttcatacgtatcctgaaagccatccgcacaaggggattagtacattccgtgccgatatcgaggtgtccacatgtggtcaaatctctccgctaaaggccctcaattacttgatcaatagctttgattctgatattttgacattggactatcatgtgcgtggctttacgcgcgacgtgtcgggcaagaaaatctacatcgaccatcgtatcaactctattcaaaattacattaatgcgaaaacgcgcaatttgtacaatatgatcgatgtgaacgtgtaccaagaaaatatcttccacactaagatgatgctcaaggattttgatttggataattacttattcggcattaccgaagcggaattaagcgaacgagaaattaagcaaattaaacaccaattgcgacaagaaatgacagaaatcttctacggacgcaatttgccatctgtgaaagcctagattgtttaaaacgcttagttatttgtggacatgtaattaatgctaagaatataaattcatgattaattctaaaattttcgaaaaactatatcgaaaaatcttgtgttattgtttctgattctgtataatgaacttgtaaggggtattaataattaataccaagaaactattgtgtccgttgtcatccacaaaggagaattattatggacgtacgtgaattagcagtacaaaaaaaacgtgaattaaaaggcttcctcaccgtaggaactaaatatgaattaaaagacgctcatgatttatccgttgcttacacaccaggtgtagcagaaccatgcttgcgtattaaagacaatgaagcagaatcctttgaattaacttgccgttccaatatggttgccgttgtatccgacggtactcgtgtactcggccttggcgatatcggcgctgctgctgcattgcctgtaatggaaggtaaatccttattgtttaaaaaatttggcgatgtagactgcattccattggtagtagatactaaagatgctgatacattgatcaacactgtaaaattgttgcaaaagaactttgctggcatcaacttggaagacatttcttctcctaaatgctatgaaatcgaaaatcgtttgaaagaagaattggaaatccctgtattccatgatgaccaacacggtacagcaatcgcatgtttggctggtgtaaaaggtgctcttcgcctcgttaaaaaagatttagctacagctaaaatcgttgtaaatggtgctggtgcagctggtgcaaacatcgctcgtttgttataccttgcaggcgctcgtgatattaccgtattggtatcctctggcgtattgcacaaagattacaaacgccttgattccttgcaaactgaattgatcgatttgcttggccttgaagaaaaacatggcaacttggctgaaaacgctaaaggcgctgacatccttcttggcgtatctgcagcaggtgctttcacaaaagaaattttggaaaacttggctgatgacgctatcgtattcgctatggcgaaccctaacccagaagcaacatacgctgatatgaaagctgctggcgttcgcattgcaggtacaggccgttccgatgcacctaaccaaatcaataacgtagctgtattccctggtatcttccgtggtgctattgacgttcgtgcatctaaaatcactgacgaaatgaaattggctgctgccgatgcattggcacacttgattccagacagcgaattgaatgatgaaaacatcatgccatccgtattcgatcctcgcgtagctcctgcagtggcaaaagcagttgctgaagtagctgtaaaacaaggcatcgccaaaaaccctcaaatcgttgaagacggtcattacgaaggctaattttaactaaatcaaatatgattttgaacatgcaccctacggggtgcatgtttttttacataaaattttaatgaagttataaaaaaatacttgtcagaatagtagtccgatgatataataattttcgttgcagagaggtactcacaattgagtaaaactcagcaaaagtagtggttgacatcaactaccgggtttgctataattagcaagtaattaatgacggggcatagcgcagtttggtagcgcacctggcttgggaccagggggtcgcaggttcgaatcctgctgctccgaccattttttattttgcgggtgtagctcaatggtagagccccagccttccaagctggtcgcgagggttcgattcccttcacccgctccatttttttttgccttttttagggtgaacgaaaaatgacgtcattagttgacgatacatcttacataatttatactataatagataattacatataaaggtaatccacatggttcagtagctcagttggatagagcaacggccttctaagccgtgggtcgggggttcgaatccctcctggatcaccaaagaaatgtaataaccataagggttttggctcttatggttatttttttattaccctaaaataaatgcaaggatatggtgcaagtatagttttttatacttgcattatccttgcatcaggtgtataagtttgatacataattgaaagtttgctcttcatcttgtatcgcatgagcatatactttaattatcattgttgtgttatcatgaccagctaatttggcaatctcagtatacggtacgttgtgttgaactaggtttgagatgaacgtatgccgagctacatggctagacaaatgtttttcaatacctaactctttaccaaccttagtaaaatagcgtttactaaaattatgcttgtcaataggacgtaagccagtctcattttcagctacccataggttgcctttagatgctgctctagcacgttttagtaccgagatagtataagtattactaatcgggattacacgcttgctcgagtgtgttttaggctcttttcgattcatgccgtattgagtttcaccccatgaagaattaacatgaaccttagctttacaatcatcaatgatctcaatttcatcccattgtaaagattgtagctcaccaatacgcaagccacactggaacagcagcagcacacaatgttctaaatggtggcctttataataattaaggaaactttgtgtctcattgactgtaagagcttcttttgggtgctttggagctgttgaggctggtttaattagagaactataaaaattagtcggaatcaaatctagactatgtagtttctttaaggtcaaacttagtacgataaatgttttctttatatttgtagaatattggtctacaaattgctgcaataatgacttagataagtcggaaataggcgtagtaccaaaaaatagtttaatcctatttttcgttatatccaagtatagtttacgagtggcttcggcatacgttgcttttgtaaagtaatcgatacagaagtcataatagctctgattggcaccagttggcacttttttattcgatgattgttgtacatggccgacttcgataaagtgatacttatataacccattatcacgatctacaatcattcttttacgctcagcttcggcctcttctttcaaggtaaaacctttggagcggaattttattattctaccctggtcatcacaatacaaaggtagattgcgtatataataatacgttttaccacttcgttgtgtttccttcgagatgatacctttacctgatggaatttggtacataatggactcgtttctcttgccatcggagtacctgttcacaaaatcattataaaagatactatagttattggcaatgaatgtttcacagtcacttattgtaaagcaatagcaattaccaactttatttttaggtattaaatacccttgatcacgtagccgttttctcagtgtttgcactgatacatttaagaatttgctcaactcttgaatagagagggctgctgtggtcgtatttgaagttttcatggccggcaacagccctcctttctaaactattagcttaataactctcgaattagttataagaacatgtccctatttattaggttattccattccattaaattagggctttgttgatttaattgctcataattgggaatggcatagaattggttaatatttaggtccccttgtggaatgtagagtatagcttgtggaaacaagaaattatatcgtctcgtatagcgttgtcgtgcatacgtattagcatctgtcaatgtcatgaactttctagctatgacattggttaaacctttagattctataactccttttagcgtgtacgaattatcggcagtaccatatccttggtcagatataattgcccatacccctagcttgttattttccatgagctcagtactagtagtggcgtttgcagaaccactaaatagcataggtgcgttaggtgcatagttaagttgtgtattatgctcacccctacatatatttatgaaccactgttccttaggaatatacaaggattgattataatagattattgaggtcgctagttgattagcttcttctacagtttttacctggctaaaatatactgcatggtattgttccatccactgtgtcatataatcaagagaatgatgtacaacgtatgcaacagggcttattgctgtatagaaattaatgttattttgtggttcttgtgctggatgattgatgttgatattcatattactcttcctccatagttaatttagaatagttagacagtgggatgcagatgacatccatttttttagttcctttggtcagttttgtatatgggcggagctttttgcggtcagatccgccatatcctttagagatgccttcatctcgaagccgatttgcaatagtatccatcgtatattccatgcgacgacctagccgttggcaagttttttcaacataagcgaatgcaggactcggtattagtatgagatctgtttgatgtataataccaacgtattggtctggattagcccagtatgtggctttatcaggtgcatatgtaacttcgttagctgcttcaccattagccaatgttctaagaaataacgttgttggcgttgcatcattacataactcattatttgcaataactaagcccttgatagtatcgcaccattgctgatataaaatattggcttgctcttgcctgtggtagttacaccatacgccaaaatcaagaattattttggcaagaagtgcttgtacctgatacatggcattaattcgtgcatgctgactaattccatatactggcgacgcactttgaatcatacagactatgtcgtcataatgctcctcaatataacggataaatagcaccatatattcgtctaaccttgctgcctttaaatgctgtttagcatgagctttatcgttttggaaatcagtcaaaacctggttatttacagcttcctgattcatgaaaattggcaatagtcgtaacttactagactgctgtaattcattaggataggattcagcagttatgattgcggtatgcatttgttgagtacgctctaagcgactgcctgcttcactagactttgccctaccttgactctccgagagtggacgaatgaacttctcaaatttagctagtaaagttttgtcatttgttagcttgcagtcatcaaatattaccgtttgatctttatagtgggttgacaccagttcaattgcacggtcagtatcattaaatgatgcgtatgtctcgtgattaaatagtaggaagaaaatctttgcgagagatgtttttctactacccgtaggagcaattagtgtcggcacatactgtatagggtgacagccctcttggaataactttcttacaaaaccactatgagcatgtaagaagagtggtaaaacaacctcgaatggggcgagctttaataatttgaggccataatcgtacaggttgtatctgtggttttggtcgacatttggcaaagttaacaatgtgtcaccatcttcattctgtccaggatgaaatttttttgcttcaaaggcttttccccaaccaggatatttatttgcttttgtgcttttcatagctgccttatcttgtatataacgttcagctatatactgtttgaacagctctttagcttttccacaatcagcattgaagctgatttcgggaaacctcttcttgagcactgaatatagagtatcaagctgttcttttgggatgatgacatctgcctctgaaatcgatgttttaacatggattacgtaaaagctttgacaacgatccaaatcgtaaacctcacgttcctctgtaaatgaaagcacgcaatttagaatctcatcttttggttcctgcgtcactttatcaatttgacaaataacaccatcgtactcaacaaagctttttaaccgattattgcaatggctagtttttgtgtttaacgagacctgaaactcatttacgttgattgccgttaagactacagggtatgtggatacgtcttgtggtcttagtgttgcttcatcatatcgatgattgacgtatgatatatcctttcctgtaagttgctcagtagttcctggtggggaaatgctagcatatgcactagatgtagatgcatctagtgtagaagaaagaggtggtgaatcttgttcatctacatttagagcggtgggaagtggtatatcttcgtagataacactattcctttctaatggctgaaatgttattaattcagcactagtgatgttggcctttggtggctcatcattgggggatagagggtaatttttttccattttgtttgcctccttaaaattatttaatgtagcagctgactacactaatagtttataattctttgtgttatactagttatatatgtaaaaaaataaaaaaatagccattttcgattttaaaaatggctaattaatacaaaaatataaagttttagcttagttaagatgagaaagatgaaaaatgaatagaagtgacttagatgttttgaacagagattttcataatgtattttttaaaagtaccccggtgagggaaaatagtacagg

SEQ ID NO: 715 - DNA, 129322 bp, Veillonella atypica
  source 1..129322: mol_type = genomic DNA
aacactaatctatttggtaaaaatttacatattgatttagtggcaactgataaagtgagtcagttacttactgataatgacaacatagaaagggcttataggattgatagtggagcgtctatttattcccaaaatttaatagctttcacaggtcttaatgcgaccggtaagacaacgattttagaagttattcagatattattacagattgtaactaatgatgctagattgaatgattctcatattaaaccaattattcagaaaattataggaagtgttgatggtacaaatgagaaaccaatagtttttgttatgtggtttgaaattgataaacaaatcttagaattaacatcttcaattataaaacgatatacaatggatgatgaatatgattttgtttataagaatgagatattgaaagtacgatcgttctcaaaactaactaaaaagaatctatttaattttgtacgctctaaggttgttaatcaacgtactgattttgcagatgctaagtttttacttgatgatatgagtattgcgagcatgtttaaggataagacaacaaaggtactttgttcgtttgaaaaatataatacggttcggaatatacgtcctacgattcctgatgtatcgattatacagtgttttgatagtgcgattagttgtattgaacagtcagatagtaaagataaatataaattgaaatttaaaaaagatggtgattctgagtacgatttatcctatgatgagttagaatctatcttatcctctggtactgtaaaagcattgcacttttttccagctctccaatctgtattgaaagcaggagggtatattttattcgatgagatagaaaatcatattaataaacgtcttgtagaatggatcctatctttatttgaaaatagggattataacccttatggggcctgcttaatttttacaactcactaccctgaactattagattcttttgtaagaaaagataatatttatattactcgtaaacgtaatgatggaacattagaggctgttaaatacagtgatgaaattgaacgtaatgaattactcaaatcaaatgttattttaggtaatttaattaaaggaacagtgcctaaatatgcatcaatgaaagcagcagagcaggcgttagcgggtattattaaaattaggtagttgattgtttatatattgagttaaattatgttgactatttaacgattttttcgtcaaataagtaaaataatattgaaaaatatatttggtttatgtatgatgagagtagttggaggtgaattatgttagtaaatattagtgcaagtaattttaaatcatttgataaaacagaacgtttatcaatgatatcctctagtaagattcaaactcatacaggtcatgttcggaaaattaaagatactaaaatattaaagaatgctgttatttatggtgctaatgcatcaggaaaatctaatttggttgaaatcttgcgatttatgcagtggactttgcaacatggattaccttttgaatcaagattatttttttctcgtacaaaagcggaaaatgaacatacagatagtgaatttgagttacaatttacacttaatgggaaattttatgcatatggtttttccgtattattatctgaaggaagaataacgggagaatggctatatgaattacggccacatgggtctgctaagcttttattcgaagtagagaatgcaatgcctacgttgggatctctaaagctaacaaaggatgctgtaaatcgatttaccatatacgctgaagattttgctcaacaagatcaaaatcgtttatttttaggtgttatgaatcatggtaaagatataaataagttaaaaggcttagaatttttatttgaaatctatgattggttgtgtaaccatattgtaattattacaccgaatacaatcctcaatagtttttcatattactaccaagaaggctcactagaaaaaattagcgagttacttgctgattttgataccggtattagtaatgtggcgataaaaaaaattacacaagaggaattaaaacagtccttaccgatagaagtctataataatttgatagagaaaattaaattaagtactacagaattcaaaggtggcaaattgacgatgcgtagtcatgatacgttttttgctatagactttcaagatatagaacatcctgacattacgactttatgtttacaccatggtgaatcaccattcgatttttctttcaaagaagaatctgatgggacacaacgtatctttgatttattggatttaatattatctaataaagatcatatggtgtatattatcgatgagttagaacgtagcttacatcctaatcttacgaaacatttcctagaactgtttatggaaactcataagaattctgatacgcaattactatttactactcatgaatcaagcattatggatttaaaattatttagacgtgatgaaatttggtttatagaacgagaccatgaaaactgtagtcacatttattctcttgctaaattcaaggaacgctatgataccaaattgagtaaagcctatttagaagggcgatatggggctataccagtgttatcctctattgtgtccattaaaggagagtaattatgggtcttcgagaattttcaaattatagatggtatattacatgattctgtatgaataaaaacatgtgacatataatctttatgtaatgcatcataaagctgtcctaaaatgtgatttaatcatattttgggacagctttttcatttaatacttgcttaaaaatgaaaataatatgaatattttattctcttcttatcaattatttatctctcattgttatactagaaagaaatattatggttgtatgatgtgtatataagggaaacgagggtacttatatattaattcatgcaactatagcgtgtgtaacatatagtttctgtataagagaggtatttatgaaacatcaattggctgctatgttggcagcaacagctgtgttgggtgtaacgactgccttcggcgctaatccattttctgatgtaacgccagattcttgggcgtatcaatctgtgtctcaattggcgagtgcgggcattattaatggctatccagatgggactttcaaaggccaaaaggatatgacccgtttcgaaatggcccaaatgattgcaaaggccatggctaatcaagaccgtgcaaatgcggagcaacaagcgatgatcaatcgtctagccgatgaattttctaatgagttgaataatttaggtgttcgcgttaaccgcttagaggatcgcgtgggcaatgtgaaagtaaccggcgatgtacggttgcggtatcttggcactaaagatacggacgatggtttcataagaacccaaggggagtatagcaaaaagtcccaatttgatatgcgtgcacgtgttcaattcaatgcgaagattaacgacaagacggatgcggtagtgcgtatgacgaccgattctattgaatttggtaatacttacgatgataatacaggtgaaatgactggggcagcttacattgatcgcgcttatgtggatcatcgatttggcaaatatgtatctgcaaaagtagggcgctttaaccaagtcatcggcaatggttatttctatgacgatgcatttgatggtgctcaaattaacatcggcaacgataaaattcaattccaaggggcccatggctatttcttaaaaggaatgtttaccaatacctccgcagatatgaatgataccgttacctatgctagcctcaaaggtcagccaaataaacatatcagcatgggtggtttctatgctcgtatgaactcaccatataatatgggcttcacatttagaaagttctatggtttccataccgatattaattttgataaggtttggattggaggcgaatggttgaaagcagctcatacggaccacagtacaggctggactgccggtgcaggctatggtcagtatgacatagcaaaaaaaggcacttgggatgtgaaagtccaatatttcaatattgatgagatgatgggcgctgtgtcctctaaatggaaccttgcctatgattcaacacaagttaaaagtgatggacacttgtggttccatggttataaaggttggctcggtactgtggactatgcattacaagatgatttaggccttagcgtatatgctgggtttaaggggaaaacaaaacctgaacttgctagttataagcgatccttggctaactactaccgtgtagagttaaattaccaattctaatcaaatagattggcacaacttaatacaatgcaaaaagatggcgaaataagatggtaaaatgtatatttcgtcatcttttttgttatattagcgtttttctacaggtgttgaggttacctctacaatcctatgaaaatgcaatgaactttattctaaaatataaaatatttgttatagtatgttatacttatgttatattctgtatataacggttatcacttataaggggttagggagatacagtgttagtagggccgaattgcagatgtgtatggttcttttttggagagaggtatagttatgaaaaaacaatttgccgatatctttgcagcaacagctgtgttgggtgtaacaactgcatttgcagcgaacccattttccgatgtaacccctgattcttgggcctaccaagccgtgtctcaattggctagcactggcatcatcactggctatccagatgggactttcagaggcgaaaatggcattactcgtttccaagtggcacaaatggtagcgaaagcgcttgctaaccaagaccgtgctaatgcggaacaacaagccttgattaaccgcttggctgatgaattttccaatgaattgaataacttgggcgttcgcgtggctcgtttagaggatcgcgtaggtaatgtgaaagtaaccggcgatatgcgtcttcgttatcttggttcccaaaagaaagatggtaactatgtaaacgctatgggcgattacagcaaaggttcccaattcgacgctcgtgctcgcattcaattcaatgcgaaggtcaatgaccgcacagacgctgtagttcgcgtaacatctggggactttgaatttggcgatgcgactaatggtggcaatgcaacggctactatcgatcgcgcttatgtaaatcacaaatttggtgaacgcgtgtctgtgaaagctggtcgcttcgaccaaatgctcggcaacggtttgatttacgatgacacattcgacggcgttcaattcaatgcaggcaacaataaagttcaattccaagcagcctacggctatgccgtagcaggcgcttttgacggtttaactaagaaatccaacaaaactttcacctatgcaggcgttaaaggtcaacttaataaacatgtaaaccttggcggcttctatgcccgtagaaatgcgcacaaatctagtggtgacgcacttagaaacatgtatggcttcagcacagacatgaactttgataaagtttgggttggtggcgaatgggtgaaagcagctggcgtttctcacggttctgcatggactgctggccttggctatggtgactacgaccaagcaaaacgcggttcttgggacgtaaaagcacaatacttcaacttcggccaaaacttaggcgctgcatcctccacatgggacatcgcttacgatctaactaataccgcatggatggctacaccagctggtacaattagtgcaatgaactaccaaggcttcaaaggctggttattaactgctgattacgcactacaaaagaacgtgggcttaacagcatactatggcttcaacaacaaaacaaacaaggctaccggcgataacgaaaaactttccaactactaccgcgtagaccttaactaccaattctaatatgatgattggtatcgttcataactaaaacaatccccttgatgagtatctcggtacttatcaaggggattttaaattagaacacgcctgtagtaattagcaagacgagcctgatatagtgtctttagaattagaacaggcgtgtagtaattagtaagacgagcctgatatggtgtctctagaaatagaacaggcgtgttctaatttgtaagatagcctgatatagtgtctctagaaatagaacaggcctgttctaatttttaggagaggtattaaagggtccaggtaatactacaggtctgtactaattttcagatgagatattaatagaacaaggccttacctctagaattaatatatctcctcgtgatatattacagataagtagtattcttacgttcatatgtataaggagacactctatgtttagctttcaaagtgagttattattacgtttacagaaacaatttatatctgaacatgaggctgaattcaaatctattgaggatttgatagaagcatttatgactcaatataatcgtggtgattttaatgatacgatagaaatgaaattacgtgatttatacgaggctgcaaaagaggctgatacgactgaggaatcaaagaaattgtacaataagattcttgcgttatgccctgatgaagtagatgctaaacgggaacttatagctcttggattacatccaagctttcaaattcatcagttgaaacagctagtagaatcgttgaaaaaacctaagaaaatggattggcatataatagaggctcgtccttatatgcgctgcctcatcgacatggggatgatatatttagaatacaatatgtataatgatgcaattgcatgcttcacccctgtctttcacggggacaagcaagaccattcaggatttcttgtgtacatgatggttgcttgttgtggcgctgccaattgggatcgtggtcgcaaggtgtatcagcgctatctcgcatgttgcgatgatatacaaaatgcatttaatcaggcaccggatatcatgttgccgatgcatatgttgtatattttattggctttgcagtgtggtgaaagtaagattgcccatgatgtattagcagatcttgttgacgaatatgaagatgttgattggttattacaagatgcaacgcggtggaacgattttgtggaagaccacttagagaccattatgtatatggtagaccaagtgattgatatagattttgatccacgggaattaataagcttatatactgctatctcatttttaccgactcaattggtgagttttgaaagcccattatggcagactttatatgatgcgtatgaatgtgttaccggtctaattgttgtgaatcggtactctaatgatagttatataggaaaacgcgagtccgttcatatgagtcccgtagaggttgctaaaggcggggctgtgcgtagcaatccggtatatgataatatacggtttggtgcacagattacactttcacaagctggcctatacacagtagctgattttaaaacagttactaaacaagaagtattgatgctaccaggcattggtaaaaaaacggtggaacaactagagcataatggcgttatatttaaagcgtaaaatgtgacttgagctcactagctatcctatgataacgaagggctatttgtcttttccataactaaaacaatccccttgatgagtatctcggtacttatcaaggggattttaaattagaacacgcctgtagtaattaataagatagcctgatatagtgtctctagaattagaacaggcctgttctaatttgtaagatagcctgatatggtctctccagaaatagaacaggcctgttctaatttttaggagaggtattaaagggtccaggcaatactacaggcctgttctaattttatttctctcatatttacaaatagcaaattgtaaattataatttaagataatttatgatttgtttacattgtgagagtgagaggactattatgagacatgtaagtaaagcaaagctatcgttagctgtggcactggcgattgttggatttgtaatgcctaatatgatggtagatgcggcttataccgctccgtatactgataatacagacttcgtagctaacagtgatgatatgatacgtgtattcccagaatacgataaaaatatatcttctatagtagcgaatggtggtatggttattattgaagacgggtattctaatattggctatggtcatagtgcatttgctaccagtaaaaatggtggagacattaaattgaaaaaaggtgtatataattctggtagagtgagtacacctgttgcccttgctcaaggcggcacaattaatataggcgtccatgatcatcacggtgaatttacgggtgatgaaatattcgttcaaggcgatgttatagttaaaaatgatccaattcatagctcaaccattaatatcggtatagatggtgaggaatccaattggtctgggctagctttcaatttatctgatgaaaataggcgaaaatttaataatatcaatgtgttccttggtgaaagaggggattgggagttattgtatcaaggtggtcttgatggcactaaccttgatagcagtactatgcctagccgtgtacatcgactcgttggttctacgaatcgaaattttcaaaatatggtagagcaaaatgagcataataaactgtatattgataagctcgaaggccatgttaattttatttatgatcctaatgatgaatatgcagataccgaagatccagaatatacaccgccaaccacaacatataatggtttaacggctgattccttctggggtggtgatattcatattacaagtgcagcccctaattctggcgctcatctatacactagccgcaaaggattagacttgtctactgaggataatgtaaacaaggttttagataatcttgcacataaggtgtattaccataactatgtgactggtgaaagaaaccttgaaggcacagtagccattgcttctgaaggtgctgaatctggccgttttaaggtattaacatctggttatgctaaagaaggtgctattacatggcaagcggatcaaaatggtcaaggtaaatatgtgtacggtaatacaacagtaacacctacaccgcaaccagtgccaacaccaacaccaacgccaacaccggcgccacaaccggcaccaacgccaacaccagcaccgcaaccggcaccaacgccaacaccagcaccgcaaccggcgccaacgccaacaccggcgccacaaccggcaccaactccaacaccggcaccgcaacctgcaccacaaccggcgccaacaccagcaccgcaaccggcaccagcccaatcaacggcatatgatactccgcatatgcgtggtgctcgttctgcgattatgagcaacatcaacggctggcgcacattaacaaatacttaccgtcctcgtgcattgcaacaaggtgcaacaacaggtatttgggcccatatcggtggcggtcaatatagctatgatgcacaaggtattgataccgacacaacctatacacgcattcaaggtggttacgacgctaaaactggtagcggttggaccgtaggcggtcaagtgtcttaccttcgtggccatgatgattatgtgttcaatggctctggcaaagaaaaggcctttgctgttggcgcttatggtttgaaagacctcggccgagatcaatacattcaacttgaatcccaagttggtcgtgtaacgaatactttcacagctcgtaatgaaattggtgaaagcctatctggcgaaacgaaggctaatgcatacactatcggcgctcgctatggtaaaactgtgaaattacaaaatggtgtatacatcgaaccgcaagcacaattgagctatactcactttggtggagatagctttaatgcaggcaccatgcatgtagaccaagctggcgtaagcagcactgctggcggtcttggccttgaaattggtaagacctttggcgcaggcagtatttatactcgtgtcggcgttaaccatgctttctctggctcggtaaaaactacatacacaagtggttctactgtgaaatcaacagaacaagatcttaaagggacatggactgaccttgcattcggtggccgttatggtatcaatgctaacaacagcctttacgctgatattagcactggtttatctggtgactataaagcaggctggtctgtaaacgctggatttacacataagttctaagatatgattacttaaaacaatctgagaatatagtctatatataaaatagccccagagtactaatagcggtgtatattagctgatagtactctggggtttttatatatatggtatcttcagaattagaacaggcctgttctaatttttaggagcagtatcaaaggggcctaccgatactacaggcgtgtactaatttttagaagagctattaaggggcttggataatgctaccggactgtactaatttctaaaaaggactatcaaggtgtgcttcattgattctacattctatattcatgaaaatgctatgaaaaacattttatatatgttacacttacaatgtataaatattttgatgataataacctgtatataatgacttatggtggttattaattgttaattttaatcgtgtatagttagtgtttttatggggtaagattatgaaaaaacaaattaccgcaatgttagcagcaactgctgtattgggcgcaacaactgcatttgctaataatccattttctgatgtgagcgcagattcttgggcgtatcaagcggtgtctcaattggctgcagctggtgttgtgaacggctatccagatgggactttcaaagggcaaaaagaaattactcgttttgaaatggctcaaatgattgcaaaagcaatggctaatcaagaccgcgctaatgcggaacaacaagcgatgattaatcgtttggctgacgaattctctaacgaattgaataacttaggcgttcgcgttggtcgtttggaagatcgcgtaggtaatgtgaaagtaacaggcgatatgcgtcttcgttatttgggggcacaagaaaagaatggtcactatgtaactgatagaactaatcttgattcccgtgattatagccaacgttctttattcgatgcgcgtgctcgcgttcaatttaatgcaaaggttaatgatcgtacagaagcagttgttcgtatgacttctggtaatattgagtttggtgatgcacatactccatctggtgtaggtgctattggtttgaaacctggtactgtaattattgatcgtgcgtatgtaaatcacaaatttggtgaaagagtatctgctaaggttggtcgtttccaacaaacatttggtaatggtttaatctatgacgatacatttgatggtgctcaattcaatgcgggcaatgataaagtccaattccaagcagcgtatggttatgctgttgaaggtggctatgcaaccgatgaatatggcgaacgcacaattaatagagataaaaacttcaccattacgtatgctggcttaaaaggtgaattgaataaacatgtagcccttggtgctttctatgctcgttacaacaaggaaaaagcatctaacaatgatatccgtaacatgtatggcttcagcacagacatgaactttgataaagtttgggttggcggcgaatgggtgaaagctcctggcgtttctcatggttatggctggactgctggacttggttacggcgcgtacaatcaagctaaacgtggtacatgggatgtgaaagcacaatatttcaactttggtgaaaacttggctgctcaatcctccacatggcaaattggctatgatgatactactagatatcttgataatacatccacatttgtaactaaattacgtggcttcaaaggctggttagcaactgcaaactatgcattacaagacaatgtaggcttaactgcatactatggcttcaataacaagacaaacaaatctactggtgataacgaaaaactttccgactactaccgtgtagaccttaactaccaattctaatgtgatgattggtatcgttcataactaaaacaatccccttgatgagtacttaggtacttaacgaggggattttaaattagtacaggcgtgtagtgatttttaagatgagcttgatatggtatcttcagaattagaacaggcctgttctaatttttagggcaccatattaaccttatcctactaaatatttaaagtccttattatactttaatctgtatatctgtatttatagatgcttattgattaaaacataagttctttttataattagtttaagatagtcagcgaggttgggcctctcttcgttaatggagggaggggtgctctatgagtgattatgagttaatcatgataattctagaggtaatgactgttgttattgcctttggtgcacttgtggctcttatttgtcttggaaaagacaaatagcccttcgttatcctaaagtaactaggtaactgaaaggccatttcatcacgtttataattcttgagatgagcctgacggaactactcgcttggctatcttcttttattataaggaaaattatatatatcgtcaaattcgaatgaactcattacatatatgatgttttataaattagtacaggggtgtactaattagtaagatgagcctgatatggtatcttcagaattagaacaggcgtgttctaatttttaagagaggtgttaagggtctcggagattaaaacaggcctgttctaatttttaggagaggtattaagggtctcagccaatactacacgcctgttctaattccaagtaggtatgtcatggaaacgcaatctcagaaaatgtggtataataagttgttaaatcgtatacaatcatttttatacttacataatctatctaccaatagtatgtattaatgtatatatatatagtattaagataggtagtatttcatattgaggaggcctcatgtttcaacgtatgtgtgcagtggctatgtttgtagtagcgctgtttgtatctgttatacccaatgccgatgctcggcaagatatttatgctttcacctataatggcaataattggtatgtggaccgcgattcaattgaccgcagcaaaccggacgggttgctacatttcacggtatataccatgattggtttgcgttatgatgtggccagtggcagcgagtattataatgcagatgtgtattattatgatcaaaaattgtctaccgaaggtggtcagttattatatcgcaacccagggattttagcggcggctcgtgtggcacgtcaacaaccggatgcgcctaaacaagcagcaaaaccagtggtagctcagccagcagcatctcaatctatggcagctcaaacggcggctcaatctgcagcgccaacagcaccgcaaccaaatatcgtcaaggctttatcgacaccggttcaagcccctgtacctgctaatggtcctgtgaaagtaaacactcaaattccaattgtgttaccaacaggtcctgtgaaaaaggtggcagctaaaacggtgatgacccttcataatacatcgcaacaaacgacaggtagcacatctgattccgatgaaacagaggctaatcacactcgtaaataattcaaaaaactgcaatctagttatatgtatactgagcatgtatcagttatggcatatttgtctgggttgcagtttttattttgtaaacatgaggctgtctgaagaaatttctaacttgtaatctgtatgcattcctttctatcaatatgcggaattggcaaatcaccaggttgaaaatagtggccttttaatgaggcattaatgaaatagatggtatataatatagatatataagtgttaacaatagagctatatatgtgttaataacagggctatatacgtgttaacaatagactgatgactgggagggcagaggtcttaacgtaacttgattgtatttgagctgtcaatagagggtagagagagatgaagcagttcgtaaaaaggttggcttgcggtgtattggcaatagccacgatgggcactcttgtagggtgcagtcgagaggcgccaagtacgacgacaagttctgaccgtgcacccgtagggtataaggcgattgctgccatgaatgcgtcggctgcggaaaaggcggaccgtagtgtgcgcaccatgtcacgagaggacaagattggtcaattgatgtgtattggcctacaaggtactacatttgatgaatcacaaaaagaattaatacgtaaatatcgcgtaggcggtatttttctcgatcatgataatatggaatccaaggaacaagtgcgggctttcacaaaaggcatacgagacactgcgaatacgtcgagcctcatgcctccgttcatcgccatgaatcgggaacgcatgcagtacaggcctagtctgatgttgccttggacggaccctaagctgttatcgaagcagggccttgatgcggtgtcgagtttggcgacgcgcacggctatcgagatgcgcgaccttgggttcaatcttaacttaggtgtcatggtgaatacccattcgttttactcgtacacgagcgatgtggaccgggcggcgcgcatcggtgagaccattaccaaacgctatgcggcgaatcacgtgtttacagggtacgaatattttccaggtggcggagattatacggtgccgggtatgaaaatagatgcgtctaaggcgagcctcatggacgatgatagtcgcgtttttgctcagcttatcggtgcgaccggtgaggaacatcctatgattatggtaaatgctgtgaaagtcacctctatcgacgccaatcagccggtgagtctctcgaagccgattattacagattggctgcagaaggagctgggctttgatggcgtagtgattactgatgatatcgaggtcggtgccgccgttgctggcatgtcaatcgaggactatgcggtccgcaccatcaatgcgggtagcgatatggttatcatttgtaagcaccctaaacatattaaggcggttcatgacgcgttgacgcaggccgtagcagatggaactatctccgaagcgcggcttgatgaatcggtgcgccgtatcatgcttatgaaatttagcaatgaacagtagagtaagcatatgctttcaagaataatatattaaacatacagaaactcttttctcacatgggaaaagagttttttgtgtgatatagatgaatttattatctatttgttaaaaactataaaaattattttatagtttatttaaattatgatataataaactcctgagaactgattttaagggaggtgagatcttatatgaaatgtagtaaccatgaggcggtgattgacgccataatggaacagtacaatcagggccgcatggaaatgagtgttgtacacggtccttacagcgttggcaaaacgtatatcgctagagagttacaggctcgattaggtaagagccataccatatatttgcttggacgtttggcgaacgaacccattcatattcgatcaattgagagagaactagaggtgccatcagggtcttttaagaccttagaggacgcattgcgtggcgtttttcaagcgagtcttgacaagcgggtcatgttcatcatagatgattatcctgcatttgtggatacggttccacaagcgccaattatattgcgtgacttgatggaaacctatcgcgaccatggcaaagtattcgtgcttctcatgggaacccatgtagatgaattgaaaggtcgcatcatcggcgaatcaagcttaattgcagcctacattcataattatttcaaggtcaatccgttcacacttgatgatgtgagagcattaggttggaactatacggatgaagatcttgctaaaatataccacgtaacaggcggtatgccggggaacctcgtgcatatagattccgccttatcggtagatgaaaatattgtgcgtctattctttaaaccacaaggtgtattgtgcatggaaccgcaacgattagtcatgcgctacattcgtaatacgggggctgctaatgcgattctctatgcattggcacagttggataaaccattctatacagaactctgccacgcgagtgagctcaaaagtggcacttttgcgacccgtatggctgacctattagatatggagattattggacgtattcaagggggcagtcgtggcccattgcgctacgcagattaccattttgtgaatactatgttccaattttggtaccagttcgtgttcccaaaccttgaggaaattaattgcggtcaagggcaatatatttacgataccattgcaaaacctgcgctagatacacttgcttaatacgattgttttagtgaaatgaattcgaattcgtggggcttataattgatttgaattcgttcagtgtataacaatcgattcgaattcaagtagctatgtaaaattgatctaaattgacgtactttactgaaataggtttgtaattatacacaaatacatatgtaacaacaaaaattccgctgtaaatctatgcatttatggcggaatttctcgtttgtctaaatactcatttgggtgtatattccaagtaagcctaggcagaaaggaacgaatatgaacgtaaagcatgtggtatgtccccaaaaggtattacaagcggtgacagacctgagtttagtgcgcgtctgccaagaacgtcgtgtatcggtgcttagtacggaacgagcggtatggcccatcgaggaattgaccattgatgcggcacaaatcgagctgtgccggcgctatcgaccgctcatcgtgcggtatgcaagccgatgcagtacagcaatgatgacggatgacgtggaatcattcctgtggatcatctttatcgaatccatctatagctttcacacgtcgggaaaggtaccattttctggctatgtgaaagcggccattcattatggttatcttaatttttacaaacaatctgctcatcagtggcgccatgagttgaccttgcctctctgtaccggagacgatgtatcagagcctgccatggatcagttcccggacgagatagatattgaacgagacatcatcggaacggtaacagaagacgaattgcgcaatcgtctgtgggctgctttcagaaaactgccacgcgagcaacaacagttattgtatgccctatatcgagatggcaagagctgcgtagacataggttatgagtcccatcagtctaggcaggctgtgcaacagcgccatcaaaaggccatcgaccaattgcggtattatatgatggtagcgaataacaaagaattcgatattcaagatatgcaaaatatgcatagttataagtaacttttaaaatctaaaatattttttaatttatatatttacagtttgtaattataggtatacaattaactcataagtgctgctaaagcacctactataacacgtgttatttaagcttttacaagaggaattcctaattttattactgactatttattaatcttaagaaaggttaagataatgttgaatacaacgtctacaaatgtaagtaataacgaattaatttcttgtaacccaaatgcaatatatggcgatgtagatcaccatatatgttgcttgatcccaatctacattgacggcggtgattatactgcttgttattatgtagatggtcggcgtgaaatcgttcataaatctattaagacggttttgaaagaggtagcgcaccacgagggagttctagcaaacggcattcaatcgtcgaggcggtcaaagccgatgtatacggaccctagaacaatgagtccgaatatgacctttgcgagcctgaaatcgcgcaaaccaatcgggcgtgatgtggtatatggtttattcaacgttatcgttccatttcaataccgcattgagccaggaccagaaccacatacaacgtatatcatcataggagactttgatcctatactcgtatttcattcccctgaccacgtgcaacgcaaactacgcgatgctttgttagaacatctcgattatacgaaacggatactcgctaaattgagtacctgcggaaatccttacgtggtggctgaaatttatggtgcctcgagaacgctagcgggagtatagcaacacattttgagagtgtgggagggacgtaatatgaattacgcaacaaaattatgtattgtttcaatggttagtgtatttagtgtatcttctatgggattggtacaagctgccgatacacctatcgtttcaacaggtggtgcggcctataatatcggactacagggtgcttctttcaccaattcggataatgtatccttaggtggtcaagctggggcaaccaacagtaatccatattctcattcaggagatccaaatgcaacgggtaataacattgccattggtcgtgtagcattgaatggttctcaaggtggtggcaacgtcgcattaggttctaaaacatttatagaaggcaaaggagactataacttcttaggtaactttgcggcaggctttaaatcaactatttctgatacaattgctatcggtgcttttgccggttctggtgctacaggtaataaaaacgtatggcttggcgctggccaagcgggtggcagcacaggtaacaatacggtgttgattggctctaactctacagtggatggtaattttaactatggtataggccataatgcagagttaaaaggtgaaagcaatgctgtggtgggtgcctacaatcatgtgacggcgaataatacctatgtactaggtgatcatgtaacgacaactttagataatgccgtagttctaggcagtcattccactgctgaaagcacagatgtggtgagcacaccaagctacacctatgcaggcggtaccgtgaactttgctggtacggcgccagtatccaccgtgtctataggtactaccggtcaagaacggactatcacccatgtagcagcaggccgcgttagtgcggactctacagatgccatcaatggttcccaattatacggtgcgaaccaacaaatcgataatctgtataacaaaattagcaacattggaaaagatgccaataaaggcgatgctcgtgccgcggcacttgctgcattacatccaatgcaatttgatccagataatcgtgtacaagtgatgggcggtattggtcactataaagatgccaatgccttagccctcggtgtgggttactatccaaaggaaaacttgctcctcacagcaggtgctaccgttagtgaccgcatcatggccaatcttggcgtatcctataaattcggtgaaaacaaaacgctacaaaaaatctctcctgcttcttataacgctctcgaacaacgggttgatactttagaagctcaaaacaaaaagttacaagaaacagtagatatgctcgtacaaaaattaaataacagataatattgagatactcagatagctgtacaatataaacagattattcataacaacctcagtatataagcggatagttagtccattgagattagctatccgttttttattgtattaattatcttataaatttgttaattattttaagataattataaacaaactatttacaaatatttaaaatatgttaatataattcatgtaaacatcatgaaagaatgatgagtgagagatcgtattatgtatttgtttgtaaatggagagggaatattatgaacaaacggaaacgcttattggcgatattgattaatggtatgttgctatctagcttatgtgtggctagtgcgacggatgttacgataggtgctggtaatggtgttgcttatgggactagcagtagtgccaacaatacgcaagatattgcagtcggtaacaaggcaaaggttgaaaactatgttggtcaaaatggcagcgtagctattggtgccaatgcgcatgttgaaaatatggcaggtggtgcagaagccgctgtaggaatggggcaaacatcatattctggtaacttttggtcctctgctcgtgtaccggcagattcatctaaggtagtgggttctgttgcgattggtaataacacatttgctcgtacaggtagtaccatgattggttcccataactaccgtggtgctattggcgatactacgatagatacagataataatggtactcgtggtgccagtttaaacgtctatgcaacaacagtcggtgctaatagctttagcaatggtgcttttaccactactactggtacatacaatgtcattagttcctcctatacaggtggtcgtttctcaacacctactcaaaactttggggctaccgtaaatggtgctttcaacagcattgaatctacaagtggtggttctacggcaggtgtagcaacagcgattactggcgttgccaatcgtgtagcgaattctaatggtgctcttgtatatggtgcaggtaatgaaatcactaattctagtgcttcgtttagcacgcctggtgaaagcgctacgtccgcgaaggattttgcagacaaattgaaaactgctgttacatcctctaatggtgctggtgctaccatggcatttggtggcggcaataaggcagactacacattgcgcacatccatgatcggtgtaaataatactgttaccggcgtacgtggtgaccaaagcaaggacaatttagccctcggcgttggcaatactgggactaaggtgcaacatatgacggttatcggttctaagaataccgtatctgacgctaagaatacgattatcgtcggcgataaccgtaccgtaacaggtgctaatcatgctgttattatcggctctagcgacaatggaacgacaacaactgttcacgatgcagtggctcttggtcataacacagacgtatccaccgaaggtggtgtagcactcggtagtggttctaaagcaacagtagccgccggtgcagttggttatgatatccttactaatgcgccatctaccgatacatctgctacctggaaatccacagcatctgctgtgtccgttggtgatgtagcaaatggcgcaacgcgtcaaattacatccgttgcggctggtacaaatgatactgatgcggtgaacgtggcacagcttaaacgattacatgacatgatatccgtaaatgcatacaatactgtcaatgttcaaggggatgtaacaaatcttaaaaaagatgtatctcgcctagataaacgcgttaatcgaggcgtagccggtgcggctgcgttagcggctcttcatccgctcgactttgatcccgatgcaaaatgggactttgcggccggctatggacatttccataatggtaatgccgctgcattaggtgcgttctatcgtccgaacgaggacgttcaattgagtgtaggctctactgtgggcaatggagatactgttgtgaatgcaggcgtttctgtgaaagtaggcgctcatagcaatgtatcacgttctcgcgtagccatcggcaaagaagtgttagaacttaagaaaaccgtagctcttcaaaatgcacaaatccaaaaattgacagccttcctaaatgatgtggcaggtacgcatatgaaagcagaccgtactacattgttcccagatgtggctagcaaccattgggcatatgaagcagtgagtgacctatcccgtcgtggtttagtagaaggatacccagatggtacatttggtggtgatcgcctgttaactcgctacgaatttgctcaaatcgtataccgtgctcttcaaaacggcgtacaagtagacgaacaactggtaacagaattcagccctgaaatggcattgttccgcgttgacacagtggcaaaaaatagccaaggacaaccgacaattgaacgagttagattgaataaaaaataatatatagagaaaaaccgatacgaactctagcgattagtagtagagtttgtatcggttttttatttgttgtattacaaaacgtaaattaaaatagtaaatcgtaatataaaatatcgtttttgcaatttgattgaatataaatggttggtgtgttacacttagcatactaggaggtaagtatatgaacactaccaaatatattcgtttagcatctatgacgatagataatataaagaatattgaacacggtcgtatcaatttcataaatacaagaaaggactataaatcgagtttattaggtatatatggtcaaaatggttctggtaaaacggcacttatagatgcgattagcgttttaaaattattacttacaggccaaaaattgccttctacaattcgtgattatatcaatatatcctctgcctctcatacgtgtgaattaaattttgaattgttaatagaggataatcataaacatattttagtagattatgaggtggaattaggcattacttcatcgattactggtgaaagtaatataacggatgatactagagatggagaacatcgtatttgtattacaaaagagcgcttacaatataagcttgaaagtgtagaaaccaatattagaaaaagtgttttaattgacacgaatgtaccggctaagcaaatctttaaacctaaatcaaaattagatttactagttggtcgtgatattgatgatattacagatctaatcgtaaataaaaaacaagcgaatgcggaatcgcgatcctttattttctctcctgagtttatgaaacgacttcatagtcgtaatgaagtgatggaatcaaatcaagattttgcattagtatattcgattttgacagacttagtgaagtatggaaatcatgatttatttgtagtaacaacggaacatagtggcttaattagtctcgatgcattaccattagagattaactatcgggctgatacgagacatattgtaggtacgattggattatccctaaatcaacctaatgtatttcctatagccgttgtacaagatattagagatagtatagctatgatgaatttggtattaacccaaattgtaccaggattaactataggtgtagaaacactaggtaaggaaaaattgcaggataatcaagacggagagcgatttgagttagtatcctataaatcaaatacatatattccattaaaatatgaatctgaagggatacgtaaaattatttccgttttaggcctattaatttctgtctataatagaaaatctattactgttgccatagatgagctagactcgggtatctttgaatatctacttggtgagattttacgaatcatttcagagaaaggtgaaggccaattaatatttacatctcataacctaagacctttagaaacacttgataaaggctgtattgcttttaccacaactaatcctagcaatcgatatacgcgaatggttaatgtaaagacaagcaataacttacgcgacttttactatagagatatcatgcttggagaacagaacgaagaattatataaatcgacaaataatgctgaaatttcttatgcttttaggaaagctggtgcatataaatggcacgacgaaaaatagtgcttgttattgttgaaggaccttctgatgcggattcattagaattatatttttctaaattttttgatagtaatactgtacatatgaaaattatgtacggtgatattacctctaaaagaggaataaaccagtcgaatattaaggctcgattaggtaatgaaattaaggtatatgctgaaaataatcattttaaagctgcagatgttcagcaaattatacatttagttgatatggatggagcttttgttgatgactctgtcattattgaggatgagacaaaagataaatttgtatatacattacagtctgttatagtcccaaatcgacaagttgctatcgagcgaaatgagcataagcgtgagaatttgaataccttaagttcaaggacctctgtaatgtggaataatattccttataaaatatattatatgtcttgtaacctggatcatgtgttacatgataagcccaatgctactgatgaggagaaaaaggctaactcattggattttaccgaaaggtattatgatgatataaatgcgtttattaaatttataagtgagtctacattttctcaatgtacaggttataaagaatcatgggattatataaaacaagataagcattcgttggagcgtaattctaacttaggattatgttttatatagagtggattgatagatagcataaaaaaggagctgttttgttacagctcctttttcgtattcaaattatttctcaaagtaccccagcatttcaatgtgtgtcaacacttcgtccatgtattcttcggtcggtacaacgtagttatagccgtccttagtggtacggttgacggttaggttttcgtcgagattggcaatcaaatctgcgcgagagattggtttagccaattgtttcatcacgtatagtaggccgttatcgacgccatcgtccacttggttgtacatgttaccaggtgtgaggtattggctgccgcctttttctacaatggtttcgatgtatttgataaagcgctctggaatgtagctttcattttcaataaacggcgtgcgaggataggaagaaccgtaaatgttgaggttgtccgtcacgatgagtaggaacagacgttgatacaacacgtcaccatcgatgacgtagcctggatagtgagacgcgatatagttgatgatgtcttgaacggtaaattccttgaacgtatccatcaacaccttgatagcgatatgaactgtattcgtccagtcctcaggaatgcccttcacgtttctagacggcgccataaagtacaggctgttcaagatgtcttgggtcaccgtttcgtcgtggttgatcttgttctcgttggtcagtttcgtcaataggctcatgcggaattgcgtgtcgtacacgtaatcgtagaactgttccttgtcgatgtaattgccgttggatagggtggaaatgtttttttccacgtctcctgaaagccaggtaatgaaggatcgttgtaatgattcgtcgcccacataggcacagccgtgttgacgagcgcgttcgatgaagtcagatacgtacacaggatcgttgaaggtttcaaggtactcgtgtgccacgtagtaatcgttggattgcaacacgcggttgatgttgttaatcttgtaattcgattgggcccgagaacgatcgtcgctattcatcgtttccgctacgagctttaacacactctttgtatatagtgtgcgttccaataaatttttatcttctgcccgtttatccgcgtacaacatgatatcgcgcaattgctccaagcgcttccaaccagggtacgtattgtacgatacataagcgatgccgcggctcgataaattctcgctgcaaatgtcgagaattttgtctttcaccatgtccggtacccaagaccagataccatgaacgatgatgtaatcgaaggtgccgaaactcttatccacgtccataatgtttttttcgagcagcgtcacattcgtaagaccgatggattcgatgatctccttgccgtgctccacctgtacgccggataggtcgatgcctgtgaaagtcgctgtagggtagtacatcgcttgtgggatgatattaccgccacaagacgcaccaagctctagcacgcgcgccttgctcggcgcaaccggattaagaccataaatcttagccttagcgtacaaattgttaatattcgtgctagaaaatggctttgaaatatataggaacgtgtcataggacgcctttaaatcattaatccctttttctacatccgtaggaacgttcatagtatgcgttgccgtatccgttgcatccggtttagatacgacattcttgttcgttgccgtttcagcagaggctgatgcggccttattttttttagtttcttttttcatgattaacccctttgtttacactccctcatgtattactgtagattagtatatcatactacatggttttatggtgaaagtttatatctttatatataactatatatagcaaattatatggattatagagttggcattctaatagatatatataactaaaaatatagaaaatagagaaattttaaatttaactattatagatgggctcacaactaaattcatgaataactcattcatgctttatgatgtacatttgataagtttcactaatttaaacacttgtttttcctgttaggtaatggtttttatatccttatttaacatgatttaatagcattttacaatatatcgaaaaaacttgtagtgcataaacatattaacatcatatttatgaagaaatcgtgattgttaatattttggtaagtaaataaatcgaaaatgattaatatatgtttactgaaattgaaaaaaatcgcacaaaaatgtgtaaaaaatacaccatttcttaacaaaaattaaaaaataaaacatttttcaaattttatgagaaaaaaatgagagaaaatgttttacaaaaagaaaattttttgttatagtatgtacatgaagtaagatgaatgaaaagtgaaacatgagaaaatgttcttcacacaatgatttttatttctattgaatagggattaattaaggattataagtgtcttaaagaaagagaaaaagaaaggggttcatagaaatatgaataagatctttaaagttgtttggagcaaaacaaaagaatgctacgttgtagtatctgaagtagcgaaaaacaatggtggtaagaaaaaagttttagctagcgtattggctggcttggctatggttggtgcaggggctgctggtacaccggtacaagcggttttctctgatagtggtagtagtattaatgtttatccaaatgcaaaaactggtaactatgttggttcaaatgctgtagtagttggttttgaaaatagaacagatgcagatattcctggtactgaccaattagggcgtgttatctatggtacaggtaatattggtgccggtaactctgctttggctgttggtaataataatgaggctagaggtacagcagtagtagctattggtcatggtgctaatgcaaaagcaaaacaatctgtagcacttggtaatgtagctcgcgcagaaaaagatggtactgtagcaattggtacatatgttaatgcagaaactactaatgtaggtacggcaactgcgcctaaatataatactaaagagacaggtgcatattctacagctgtaggtgcgttctcttggactaaaggtgactactcagcggcttatggttaccaagctgaagcaaccggtactaatgcagttgctattggtcgtgtgagcaaagctacaggtacttctgcaacagcagttggtgttaataacaaggctcaggctcaagattcttcagcagttggttcctctaatacaattgatgatattgccactcaatcaagtgcatttggtcgcgaaaatacagtaaaccgtgatggctctattgctgcaggttataaaaatactgctgttggtcaacgtaacgttgctatcggtaatcaaaatactactgcaggtgaagaaactatcggtatcggtactaaagtaattgctggtacaggtaaaacgattgctattggtggagtatataaccctggtggtggtgttgaaaagcaaactattgctcgtggtaatgacacaattaatgcagctacaggtcaagtaaataatatctttgctcttgcaattggtaatggtgctcaagcagatggtaaagctaaaagtgcatctggcatgattgctattggtcaagatgtaacagcggataataacaatactgttgcaattggtgttcaaactaaggcaactggtaataatgctttggctgttggtagtactgcacaagctattggcacttctagtgctgcatttggtacacaagcagttgcaaatggtactggtgccactgcatttggtccaggttctagtgctggcactggtgcagttactgctgatggttctgtagcagtaggtcgtaaagctactgtaactgctgcgggcggtgttggcatcggttggactgcctctgctagtgagaagaatgcaactgctattggttttagtgcaacagcaagtggtgtacaatccgttgctattggtggtggcgatgaatacgactatccaggtactgagcgtggtaaacactttacaactgcttctggtaaaagctctgtagcagttggcagctatgctaaagctacagaagaaaatgcaatggcatttggtacagatgcaaatgctaatatcgcaggaggcgtagcgctcggttctgaatccaaaacaactactgcagcaggtgtacaaggttacaatccagcatctgatcgtacaaacaaatacagcactcaaggcggtgctgttggtacatccactttagcagctgtttctatcggtgatggctctgctaaaactcgtcaattaacaggccttgcagcaggtactgcagacactgatgctgttaacgtagctcaattgaaaaacgttaacttgaaatatgctggtgatactggtaatagcgatgtattgttgaaagatggtactttgaaagtaaaaggtgataacaactttatctctacatccgctgatggtacaggtattactgtaacagctaaaattggtaatcctattactgctaatgctgctggtaaagcagaagcgcctgctacaaatggccttgcaacaactacaaatgtagctgatgcaatcaatgcttctggttggaatgtagtttcttctaataatggtggtagtgtaacaggtactcaagcaactaaattggtaaatcctggcagtaaagttaccttgagtgctggtaaaaatattgtattagatcaaaatgataaacaattcacatattccttgaataaagacgttgatttgactaaagatggttctttaacaattggcgatactaaaatcaacaatgctggtatgactattactggtggtccatccattactaaaactggtatcgatgctggtagcaagaaaatcacaaatgttacagctggtacagctgatactgatgcagtaaacgtaaaacaattaaaagatactgaaaaacacattaaacctgacacatatgcagtagcaaatgatggttctgtaacattaaaatatgttgatggtaatggtgctgaacaaactgaaacagctaaaattactggtattgctaagaagtcaaaagttatcaatggtcaaaacacaactgttgaagaaggtacagatacaactgataacagcgtaacttacaaagtaaatgtgaaaggtgatttagctgatatctcctccatcacaaatggtactggctctggtaaaatctccttcgaaggtgaccaagttgtaaaagttggtggcgatcatcctatctcctttgatggtaaaggtggttatgtaactggcttacaaaataaagattgggatattgctaacccaactgttgtatctggtcgtgcagcaactgaagaccaattgaaaaaagtaagcgatggttttaataacaccgttaaattaactggtaattctggtgctactggcacacaaaaattaaaccaaaatggtggtttgagctttggtgtagttggtgctgataatggtaaatacattacaacaactgcttctggcagcaatgttgtagctgacttgtctactgatgcaaaaaataagttaaatagcaaagtagttgttactggttctggtgctgctacagtagctgcacctacagtaaccactaatcctgatggtagcactgtaactacttatactgttcatgttgaccctgcaactgcaactgcagcttctactgaaagtgtagttaagaaagctgtaacaggcgatacaaacattgctgatgtttctgtagcagatggtaaagctactggtgatgtaggtgctaaatatgaggtatccgtatctcgtaatgccgttaaagatgcagctcgtgaagctgtaacagtaaataacggtggtacaacaactggtggtacttatacagcagatacaaataaccctatctctgtaacagcgaaaccagataatactaaccacaatacaacatatgaagttacattcgatggcaataaagctgcaaaacaaattccattaacttataaagcaactaatggtactattacaagtgctgatcaaaccgttaaactagataaaggcttgaacttcacaggtggtgattatacaactgctagcgttggtgctgatggtaaagtaacatttgatgttaaccttggtacagctccaacagtaactgatggtaaacctggtgttccaggacaagctggtgcagctggtaaggatggtattgctaccgttaaaactgtagtagatacaattaataactctggttggaaagcaaatgctaaagcaaatggtggtacacttgttggtaattctacagcgactgttgtaaagcctggtgatcaagtaaactttgcggctggtaaaaacttaacagttaaacaagatttgactggtgaacatacatacacttattctttgaataaagatgtcgatcttactaatgctggttccttaactgttggtgatactaaagtaaataatgatggtattacaattaaggctcctacacctgcagcgggtacaacacctactacagatgttaagttgacgaatactggattagataatggcggtaataaaatcgttaatgtagctgaaggtacagctgatactgatgcagttaacgtaaaacaattgaaagacgctaaaactgtactagctgatggtaaaaatacgaaaaaatctggtactggtacagctgctgatccatataaagtgaatgtagaaggcgatttaaccggtatttcctccatcacgaatgatggtacaaacaatggcaaaatttcctttggtccaaataaaactgtaactgtagatggtgatcatagtattactctaaatgcaagcacaggtaagattggtggtttacaaaacttaacatttgatccaacaaactttacatctggtcaagcagctacagaagaccaattgaaatccgttcatgatactttgaaagcaaacgaacgtcatattgcacctacaacagtggcaactggttctactgaaaataaaggtggtacaactgtagggactgaaaatatatataaatatgatgcaactactaagaaagttacattgacatacaatgatggtaatggtcatgcagtaactgatactaaagcagttatcgatttctccgctttgaatactggtggtacaacagcttctacttggacggctaaaacatctgcagaaaatacaactgcaggttctgaagtaggtaaacatgctggtgacactagccaagtaattggtgatcaaaattctgttgatttccaagctggtaaaaacatgactgtgaaacaaactaatgatggtaatggtaatacaactattaactatgcattggataagaatcttgatgtagaatccgttcacgttggtaaagacggtaaagatggtaagattggtatcgatggtaaagacggtgtagatggccttgatggtactaaccgtgtagacattcatgtagaaaaaggtgctaaaggtgttgacggcactgacggtcatgatggcgtaaatggccataatggtaaagatggcatgactcgtatcgtttacgaagataagggtggtaaacaagaggttgctacacttaatgatggtatgaaatatgctggtgatgatgcacaaggtactgataaaactaaagttatcgctaagaaacttaatgaaacattagatattatcggtggtgctaacaaagctgacttgactactgataacatcggtgtaaataacgatggtaatggtaaattacttgttcaattgtctaaaaaacttaaaggtttggattctgttcaaactaaaactgttgaattaggcgaccatacaacatctggtggcacaactaatattacttataatgctggtgataaacgtattgagtacacaacacctggtgcaactcctggtactacggatactaagaaagtagcaactactgatgatatctggacaatccaaggtaatggtactgatgttgctcctgtaaatggtaaggttaatgtaaaagctggcgaaaatatccttatcacaactccaactactgctgatggttctatgactatcaatgcagtaacaccagctgtttatacagataaaaatggtaacaagctaactaaggataaagatggtaaattccataagcctgatggtacagaagtagcagcagctgatgttattacatccattcaagatgcagctggtaatgtaactggcggtaactccatcgttaacaacgttggctccgctattaaaaacgctggtaatgcaggtgattctttcttgactaagttagatgctgctaacactgcaactccaaatgcagcagtaaacgtatctgacttgaagaatacagctgatggcttgactgataaaggtttgaaattcaacgctaatgaaggcggcgttaaaacaaataaactaggttccacagtaacagttcaaggttctggtgctttaactgcgggtaaagcatatgctgatgaatacaacacagctaatattagaacaaatattgaacaaggtactgatggtaatacaacaatcaacgttggtttagctaaagagctaaaagatattaactctatctctaatggcggttcttctatcactattagtaatgttccaactggtgcaactactcctgctgtaactatctctggtggcaacttgtccatgggcaatggcacaacaaataataagattgtgaacttggctcctggtacaggtgataatgatgcagttaacgtgaaacagttgaaagatactgaattacacattactcctggcacatatacacctggtgctgataaaaaagttaaattaacgtatacagatggtaataatactgtagttaatggtaaagaagctgttatcgacttgtctggtttggcaacaggtggtactacttctactgaaaaagtacaaaaagcagccgatgctactgatgacaaaaatattgcagaggtaggaccaaaatctggtgatacatttggtgctgctaatgcgacttatgaagtatccgtatcccgtaacgctgttaaagacgcagctcgtgaagcagtaacgattaataatggtggtacaaaatctggtactacatacacaccaaatgctgataacccaatcacagtaacacctaaagaagatgcagctaatcataatacaacttatgaagtgacttttgatggtaataaagctgcaaaacaaattccattaacttataaagcaactaatggtactattacaactgctgatcaaacagtaaaactagataaaggcttgaacttcacaggtggtgattatacaactgctagcgttggtgctgatggtaaagtaacatttgatgttactcttggtacaactccaacagtaactgatggtaaacctggtgttccaggacaagctggtgcagctggtaaagatggtattgctactgttaaaactgtagtagatacaatcaataactctggttggaaagcaaatgctaaagcaaatggtggtaaacttgatggtaattctacagcgactgttgtaaaacctggtgatcaagtaaactttgcggctggtaaaaacttaacagttaaacaagatttgactggtgaacatacatacacttattctttgaataaagatgtcgatcttactaatgctggttccttaactgttggtgatactaaagtaaataatgatggtattacaattaaggctcctacacctgcagcgggtacaacacctactacagatgttaagttgacgaatactggattagataatggcggtaataaaatcgttaatgtagctgaaggtacagctgatactgatgcagttaacgtaaaacaattgaaagacgctaaaactgtactagctgatggtaaaaatacgaaaaaatctggtactggtacagctgctgatccatataaagtgaatgtagaaggcgatttaactggtatttcctccatcacaaatggtggtacaaacaatggtaaaatttcctttggtccaaataaaactgtaactgtagatggtgatcatagtattactctaaatgcaagcacaggtaagattggtggtttacaaaacttaacatttgatccaacaaactttacatctggtcaagcagctacagaagaccaattgaaatccgttcatgatactttgaaagcaaatgaacgtcatattgcacctacaacagtggcaactggctctactgaaactaaaggtggtacagctaatgctggggggactgcaaatgtatacaaatatgatgcagctagtaaaactgttacattgacttacaatgatggtaatggtcatgcagtcactgatactaaagcagttatcgacttctctgcattgaatactggtggtacaacagcttctacttggacggctaaaacatctgcagaaaatacaactgcaggttctgaagtaggtaaacatgctggtgacactagccaagtaattggtaatcaaaattctgttgatttccaagctggtaaaaacatgactgtgaaacaaactaatgatggtaatggtaatacaactattaactatgcattggataagaatcttgatgtagaatctgttcacgttggtaaagatggtaaagatggtaagattggtatcgatggtaaagacggtgtagatggccttgatggtactaatcgtgtagatatccatgtagaaaaaggtgccaaaggtgtagatggtactgatggtcatgatggtgtaaacggccataacggtaaagacggtatgactcgtatcgtctacgaagataagggtggtaaacaagaggttgctacacttaacgatggtttgaaattcactggtaacaatgaatctactgtaaataaccataaacttaatacacttgtaaaagttcaaggtgaaggtacaaaagaaagtactgtagttgatcctgcaacaggtaagaaatatgtagtactgtctgatggtacgactaaattcgaatctgctaaagacaacatcgcagtagaagcggatggtacagatacattaactgttaagttgaacaaaaacctcaaaggtttgaacagcatccaacttggtggtaacactattcaaagtaatggtgataacattactttcacaactaatggtggcactacaaaaactgtagctactacagatcaattgtggacaatccaagctaatggtactgatgttcctgctacaaacggtaaagttaatgttgttggtaaagatggcattactgtagctaaaaatgcagctggtaaccttgaaatcagcggtgctggtcttggcacaatgaatggttttgatgtaactgctaacaatggtgctacaagtaaaactattgataatggtaaaaaagtagacttcaatgctggtagcaatttaactgttaaacaaacaaatgatgccactggcactcatattgagtatgcattgaaagaagctgttgatcttggcactaatggttccttgaaagcaggcgatactactgttaataaagatggtgtaacaattgctaatggtccttccattactaagactggtgtagatgcaggcgataagaaaatcactaacgtagctgatggtgctgtgaatgcaacatctaaagatgcagttaatggttcccaattgaagaaatacactgatgcagcgaaaacaacagtagaagctggcgatgacaacgttaaggttgagactgataattcagcagcagatggtcatactaactacaaagtatccttaaaacctgttgtaactattggtgatactcataaagttaaaatcgatggtcaaactggcgacatcactggtttaacaaatgtagatcttactgatcctacatttgcaactaagggtcgtgcagcaactgaagaacaattgaataaagttcttactgaggctaagaaaaaagccgttgaaaaagtacaagctggtaccgcagctgctggtgatacaaatattgctactgtagctccaaaagctggcgatacattcggtgcagctggtgcaacatatgaagtgtctgtatctaaaaatgctgttaaagatgctgctaaagaagctgttaaagtaacttctgcaagccctgctattacagtaactgctgatacatctgtagctcatgaaacaacttataaagttggtttcgatggtaatcaagctgcaactcaaattcctttaacatacaaacaaaacggtggtagtgctcgtacagttaaattgtccgatggcttgaacttcattgatggcacaaatacaaaagctcgtacagctgctgatggtaaagttacatttgatgtaatgggtgatctaacaggtattacatccatctctaatgctgctggtggtcctaaaataacattcggtggtaactccatcaatgtaacaggtggtaaccttgatatgggtggtaagaaaattactaacattggtaaaggtacagatccaacagatgcggcacgtgttggtcaattgactaaggttacatctaacaaccactctgttgtaattcataaaactacagatgctgatggtgctccagtttacgacttggcagtaacaggtactccaggtgctcctgcagctgaccctcgtgtagatatgctcggcgaagaaatcggtcgtgtaggtgctcaaggcgcagctctctccgcattgaaacctatccaatacgatccattagaaccaactcaaatcatggctggttatggtaactaccgtggtaactccgcagtggctcttggcgtagctcattacaaaaatgaatctacattaatccatggtggcgtatcctgggctggtggttctagccacatgatggcaaacgctggtgtaacttggaaagttggtaaccgtgatagcgaagctgctgtagcagatcgttaccgcaaaggccctatcagttccgcgtatgcaatgcaacaagaaatggcagctatgaaagctcaaaatgccggattaaaaggcgaagtatctgacttgaaagcagaaaatgaacaaatgaaagctcaaattgctgcaatgatggcaaaattaggtttataatttgatagattaaactttcacagataacgggaagagggaactcgataccgagaaccctctcgtcccttttggttcgactaagaaaagaggaatagatatgaaaaaatctacaatgcttgctttcacagcagcagtattaatgagcgctgcatcccttactggtcacgcagccagcgcacctacatatgatgatgtattaattgttaaaaaccctgtaatgacgccacaactcggatctgttgtactcgttcctgtagcgagcccacaaacggtggctgctgttcatgattatgtgaaagcttggcaaaatgcagaaatcaatattgcaaaagctaaggttaaatacgatgatcataaacaattgacgaaatctgaaaaggtttggttgcattcttatgacaaacataactatgctgactatttccgcacacattccatcggtcgtgtgcatggtcaagaagtgttcatgaactggaacggtgaaaatcgcaacaaaaatgaatacgaatactttgatatgccaaaatacaatgagcaagatggtttcaccaatagctatgggtacaatgtacttcgtggtatggtagatcaaattaatgcagttatccaagagcaaaagaaaatcggtggtcctatgactgacgaagaagcacaagcgttggaagactccattttggacatcatggctcatgatcaagaacatgtaaacaatgacgaacttcgtcactacatgaacgaaacaatttggtacgccgcaaaacaaacggtgaaaaacaaagctagcgaagaacctcaagctggtgatgaccacgaagtagaccttcgcgcagcaatggctaatccgcctgcagatcaacctcaatctcgtaaagtaaacttacgtgatgctataggcaaataatctggctgaacactaaattataaatccatatggcccttataggctctctaatcccacccccctttcttctataggggccataataaaaacgctcacactgtgagaacggacttttgaattgaacgcaattttgaaagtaccgtcccatagtgtgggcgttttttggtgcataaaatatggtttatagtagatccataggttcattttgtgtgtagttttatttggaatactagcatatattaatagatatatattaacaaaccataaaatttagcattatacaatttaatgtattgaattgatgaatatcttataaatacagtgttttgctgattaatcgtgtaatttcgatttattaaatttatagaatagtggcattgattagaggccttattttgtctgattttatattatttaacatatttataaactaaaaagaactatgacttatatgaaaagtatatgaagaaaatgtcgttaagtacgctataaacatagttatagcgtactttttgataaatgtgattgtttttacacatacatataaaattcagtttattttcatctaaaatataaaatttcattaaataaataggtgtaaaagtatttacaattaattaataaattgatattattaagttatcctatatgaagtgtgtgtgaatgagagaaaaaccactcttcatgaagtgaactaaagtgtaaaagttacatttttcatgtacttatgagaaaggggttcaaaggttttatgaataaggtctttaaagtcgtttggagcaaatctaaggaatgctacgttgtagttcctgaaattgcgaaaaataatagcggcaaaaagaaagtcctagctagcgtattagctggtttagcgcttgttggcgttggcgcacaaatgggtactcctgtagatgcgttcacaagtactaaccctcttaagactgataacagtattaatactaacgacagtcgtatcaatattaaaactgcaaagacagtaggcgaatatggtgatcaaactgttggtgttaattctgttgcagtgggttatggcaactatactaataatgaagatggcacaattgtttatggtgcggcaaacagtgcaactgcaaatgcggctattgcattaggtaatcgtaatgaagcatctggtggtaatgcagtagcacttggtactagtaatacagctactaacgttaaaacaattgccattggtaataaatctaatgctaatgcagatggtgccattgctatcggtgcatacaataatcaaaactttacaactggtagtagtaatacaacacctaaacaagcgggtggtaattccgtcgttgttggtaactactcccatgctggtggtagacaaagtgtggctattggtaacaatgcaacgactcaacatgatgattctgtagctattggtgctgacgtatctgctttggcaggtcataacattgctatcggttctggtggtacaattgcacaatccgcacctggcaaaacaggatctgcagcaattgcaataggtcttaatgcacgagctacatatggtaatgatcttggcgcattcgacatgattgctattggtaatcaagcaactgcatctgctaatgctgcgacagctattggtacattatccaaagcaactggcaataactccactgcaattggtaataaagctacagcatctgcttctggtgcgctcgcatttggtcaagcaacacaagcaactgcacatggtgctcttgcaactggtaatggtgcagaatctaagggcgtaggttccactgctgttggccgtacggcaaaagctaataatgatggttctgttgcagtaggttttaacgcagaggctactggtgaccatgcgattgcaatcggtggtgatggtaaaggtgctcctttcacagacagccctaatacatatggtggattaggtaataaaacgacagcatctgctacaaatgcaatttctgttggttatactgcaaaagctgataaagttgatggtgtagcactaggctctagctctgttacaacaacagataaaggcgttaaaggttacaatccttccgatgaccatacacgtcattacacaaacttagctaacaatgttcgcacagctactactgctgctgtatccatcggtaatggtagcacattgactcgtcaattgacaggccttgctgctggtactgctgatacagatgctgttaacgtagctcaattgaaaaacgttggcgttgcattgactggtaatactggttctagcgacttcttggctgacggcggtaaattgaatgttcgtggcgaaggccgtgtatccgcagctgttgctgatgaaaatactaaagactccagattgactttgacatttgatgacaaaggcatggtgaaagctggtaaaaatgttactgttgatgaaaaaacagttaatggtcgtactacatacacaatcaacgctgcagacgctgctgcgaaatacgatttcttaacaaatgctaaggctaacggtggtaacttagacggcactgcaaaacctgcaactgtagcaagcggcactactattaactacgcagctggtaaaaacttaacagtaaaacaagatatcaaccaatctgcaggcgaacaaacatatacatattccttggataaggatttaaaagaaattacatccatcactaacaatggtggtacaacaatgaactttggtccaaacaacatcagcattactggtggtaacttggatcttggcggtaataacattactaaccttaaatctggtggcaatgtaatcaataacgctgctaacattggcgacgtaattcgtatttccaaagctaatgacttgcatgtagctcctacagcaggtactaacaataacgtagctgaatacactgtagatgctaacaaaaaggttacattaacataccaagatggtaatggcaacactgtaaatgggcctaaggctgttatcgacttgagcggtttgaaaactggcgatatgagctccttcaacgtgaaatcttctgctacagaaggtaaggttgcacaaggttctgctggtgttcaagaaatccgtgacggcaaaactgtggaaatgcaagccggcaaaaacatgaccattaaacaaactaataaaaatggtaatgcagctgttgaatttgcattgaacaaagacatcgatttgactccagatgggtctatcaaaatcggcgacactaacatcactgacaatggtttgactatcaacggtggtccttccattactaaaactggtatcaatgctggtggtttgaacattactaatgtaaaagctggcgtaaatgataacgatgcagttaatgttagccaattgaaacaagttcgtgctgatgaacgtcacatcaaacctggtgaatacgcagttgataacaacggcaaagtaacaatgacttaccttgatggcaacaacaaggacgttcctaacgaaacagctgttatcacaggtattgctaaacaagatctttccaatatcaacaagggtggcgaaacagtcatccaaaatcttgctaaaaaatccatcgatatggaaaatggtaagaatacaaaggtgagcaatcgtgaaatcaatggcgttaaaactttcaaagtagacgttgaaggtgatttaaacgacattacatccatcacaaacaaagctggcgatggcaaggttgtattcggtggtaaccaaactgttaacgtagcaggtgatcacaatattaacttgaatgctaaagttggtgacatcactggtttaactaacgtaactttggatgctcctgattttgctaaaaaaggtcgcgccgctactgaagaacaattaagcatcgttaataacggtttcaataacacagttggcttgactggtaacacaggcgctactgatcttcaaaaattgaaccaagctggtggcttgagctttggcgtaattggtgctaacaatggccaatacatcaaaacaactgcatctggtagcaacgtagctgttgacttgtccgatgaagctaaaggtaaattgaacaatactgtagaggttcgtggtaaaaatgctgcgaaggttacttctgtaacagaaaatactgttgacggtggtaagaaaacaatctacacagtagacgttgataatgtaacacctacagctgcttctactgaaaaggtgaaagcaaaagctgattccagtagttctacagataaaaacattgctaaggttactcctcaagcaggtgaccaatatggcgacgctggtgcaacttacgaagtaaacgtatcccgtaacgacgtaaaagacgcagctcgtgaagcggtaactgtaaatactagcaatacaactaacaaccctatcactgttacacctgttcaagatgaaacaaatcataacacaacttacacagtaacattcgatggtaacaaagcagctactcaaattcctttgacatacaaagcgaatggccaaaatgctcaaacagttacattggataaaggtttgaacttcacaaatggcagaaacacaacagcttctgtagatgctgaaggcgttgttaaatacgatgtgaataaagatttagttaacatcaattccatttccaatactacaaatggtccaaaaatggaatttggtcctaactccattaacatcacaaatggccctatcaacatgggtgaccaaaacattactaaccttaaatctggtggtgatgttatcaataacgcagctaatattggcgacgtaaaacgtatttctaaagctaacgacttgcacattgctccaacatcttctgaccgtcaaggtgaaactactacatcttacgcttacgatgcagcaagcaaatctgtaacattgaaatataacgatggtaacggtgctaaccaatctggtacagtggcgaaaatcgacttatccggtttggctgatcaaatcaaagacggttattccttctctactgacgctaaaggtaatgtagttggtaaccatgctgttacacctgtagcaaatggtaaaactgtttcttatgcagcaggtaaaaacttaactgttgctcaaaatattgataatgcaactggtgaacatacttacacatatgcattgtccaatgatgttgatttaacaccaaatggttccttgaaaattggtgacacaattctcaacaatggtgatttaacaattacaggcggcccatccgttactaagactggtatcaacgctggtaacttgaacattactaatgtaaaagctggcgtaaacgatactgatgcagttaacgtaaaacaattgaaagatgctcgtacagtagtaacttctaacgataactccgtaacgattaacaaaactgaaaacggtaaccaagtgacttacgacttgcacgtggctcctggtgctgcacaatccgtatggaatgtgaaatccacaggtaacacaactgctgattctgaaacagctgccaaaactatctctgatggtaaaacagttgaaatggcagcaggcaagaacttgactgtaaaacaaactagcaacaacgacggcgctaaggttgaattcgacttagctaacgatatcaagattggtaacgacggcaaagacggtagagacggcgttgacggtaaaatcggtgtaaacggtaaagatggttcttccgttgtgatcaacggtaaagacggctccatcggcttaaatggtaaggacggcaaagacggccttactatgaagggcgaaaaaggccaacctggcttaaacggcaaagatggcatcactcgcatcgtttatgaagataacaaccatgataaacatgaagtggctacgttagatgatggtttgaacttcactggtaacaacactgatacagtgaacaaacaaaaattgaacagcttagtaaaagtacaaggcgaaggtgtagataaaaatacatctgctacattcaagagcgcagctggtaacatcaacgtaaaagctgatggtacagatactttagaagttcaattgaacaaagacttgaaaaatatcaacacgattaagaacggtggcaatgctactttcacaattggtggcgataactttgcattcaatggtggcaacgtaagcatcggtggtaacaatattactaaccttaaatctggcattgtaaataacaatgatacagataacacaaatgctgctaacatcggcgacgttaagaatatttccaaagctaacgacttgcacattgctcctactacatctaatcgtactggtgaaacaactacatcttacgcttacgatacagcaagcaaatccgtaaccttgaaatacaacgatggcaacggcgctaaccaagctggtacaatcgcaaaaatcgacttgtccggtttggctgatcaaatcaaagacggttattctttctccactgacgctaaaggcaatgtagttggtaaccatgctgtaacagctgttggcaatggtaaaactgtttcctatgcagcaggcgataacttgactgtaaaacaagatatcgacgctacaactggtgaacacacttatacatacgcattgtccaatgacatcaaggtcggcaaagacggtaaagatggcatcgatggtaaaattggcgtaaacggtaaagatggttcctccgttgtgattaacggtaaagatggttctatcggcctcaatggtaaggacggcaaagatggtcttactatccgtggcgaaaaaggtcaagatggcgtagacggtaaaaatggtactaacggtatcactcgtatcgtatacgaagaccacaacaacgataaacacgaagtggctacattggatgacggcatgaaatatgctggcgacgatgcacaaggcgctgacaaatccaaagtaatcgctaagaaattgaacgaaactatggacgttgttggtggtgcagataagtccaaattgactgacaacaacattggcgtgaacaacgtagatggcaagttgaaggttcaattgtccaaagaagtgaacttgactccatctggttccttaacaattggcgatactgtagttaacaacaatggtttaactatctctggtggtccatccatcattaaaactggtatcaacgctggtaacttgaacattactaatgtaaaagctggcgtaaacgacactgatgcagttaatgtaaaacaattaaaagatgctcgtacagttgttacatctaacgataattccgtaacagttaataaaactgaaaacggtaaccaagtgacttacgacttgcatgtagctcctggtgctgcacaatccgtatggaatgtgaaatccacaggcaatacaactgctgattctgaaacagctccgaaaactatctctgatggtaaaacagttgaaatggcagcaggcaagaacttgactgtaaaacaaactagcaacaatgacggcgctaaggttgaattcgacttggctaacgatatcaagattggtaaagatggcaaagacggcgttgacggcaaaattggcgtaaatggtaaagatggttcctctgttgtgatcaacggtaaagacggctccatcggcttaaatggtaaggacggcaaagacggtcttactatgaagggcgaaaaaggcgctgacggcgtaactcgcatcgtttacgaagatcatgacaacaataaacacgaagtagctacattggatgatggtttacgtttcgacgctaactccggtggcgaaaagaaaaataaacttggctccaaagtaactgtaaaaggtacaggtgctaaagctgattccgaatacgattcctctaacatcaaaacaagtatcacccaaggtgctgatggtaacagcgaaatcaacatcggtttggctaaagacttgaacaacatcaacacaattaaaaacggtggtcctgctactttcacaatcggcggcaacgaattcaaattcgacggcggcaatgtgaacatgggtggcaacaacattacgaaccttaaatctggtatcgtaaataacaactccactgatgatacaaatggtgctaacatcggcgacgttaagacaatttccaaagctaacgatttgcacattgctcctacaacatctaatcgtactggtgaaacaactacatcttacgcttacgatacagcaagcaaatctgtaacattgaaatacaacgatggcaacggcgctaaccaagctggtacaattgcgaaaatcgacttgtccggtttggctgatcaaatcaaagacggttattccttctctactgatgcaaaaggcaatgtagttggtaaccatgcagttacagctgtaggcaacggcaagactgtttcctatgcagcaggcgataacttgacaattgctcaacatatcgataatgcaactggtgaacaaacatatacatatgcattgtccaacgatattaagattggtaaagatggtaaagatggtgttgatggtaaaatcggcgtaaatggtaaagatggttcctccgttgtgatcaacggtaaagacggctccatcggcttaaatggtaaggacggcaaagatggtcttactatgcaagcaaaagacggtcaacctggtgtaaacggtaaagatggtatcactcgtatcgtatacgaagataacagcaagaatacacacgaagtggctacattggatgacggcatgaaatatgctggcgacgatgcacaaggcacagataaatccaaagtaatcgctaagaaattgaacgaaactatggacgttgttggtggtgcagataagtccaaattgactgacaacaacatcggcgtgaacaacgtagatggcaagttgaaggttcaattgtccaaagaagtgaacttgactccatccggttccttaacaatcggcgatactgtagttaacaacaatggtttgactatctctggtggcccatccattactaagactggtatcaatgctggtaataaaacaattgttaacgtagatgctggtgtaaatgatactgatgcagttaacgtaaaacaattgaagacagctaaaacagaagttaaggctggtaataatgtaactgtagacacaacttacggtaatgatggtcatacaatttatactgttaatgcgaacgacgtagctcttggcgatgcagtattgaaatactccgctaacggcactaacacgcaatccgttaaattgtctcaaggcttgaacttcgttgacggtaactacacatctgcttctgttgatgcaaatggtcaagttaaatacgacgtaacaatcggtaaggtgaaagacggcgttgacggtaaaccaggcgtagatggtaacgatggtatcgcaacagttaaaactgtagttgatacaatcaacaactccggctggaaaggtgatgttactggtaacacagtcaataaccatactgcaacaatcgttaaacctggcacaactgtaaacttcggtgctggtaaaaacttaactgttgaacaaatcgttaatgctgtaacaggcgatcatacttacaactatgcattgtccgatgacatcaaagttggtaaagatggcaaagacggtgttgacggtaagattggtgtaaatggtaaagatggttcctccgttgtcatcaacggcaaagacggctccatcggcttaaatggtaaggacggcaaagacggtcttactatgaaagctaaagatggccaaccaggtgtaaacggtaaagacggtatcactcgtatcgtatacgaagataacagcaaaactacacacgaagtggctacattggatgacggcatgaaatatgctggcgacgatgcacaaggtacggacaaatccaaagttatcgctaagaaattaaacgaaactatggatgttgttggtggtgcagataagtctaaattgactgacaacaacatcggcgtgaataacgtagatggcaagttgaaagttcaattagctcaaaacatcaacttgactccagcaggttccttaacaattggcgatactatgattaacgatggtggcttgactatcaacaatggtccttccatcactaaaggcggtatcaatgctggtaataaaacaatcgttaacgtagctcctggtgtaaatggtactgatgccgtaaacgttaaccaattgaactctgctagaacagaagttgaagaaggggacaacgtaactgtaacatcccgtacaggtgctaacggtcaaacaatctacaaggtaagtgctactggcgttaaccttggcgatgcagaattgaaatactctgctaacggcactaacactcaatccgttaaattgtctaaaggtttgaacttcgttgatggtaactacacatctgcttccgttgatgcaaatggtcaagttaaatacgacgttaaccttggcaacatcaaacaaggtacagacggaaaaccaggtgtagatggcaaagatggtatcgcaacagttaaaactgtagttgatacaatcaacaactccggttggaaagctaatgcaacaggtaatgtggtaggtacatccactgcaacaatcgttaaacctggtagcacagtaaattacggcgcaggcaaaaacttgaacgtaaaacaaactgtaaacggcgaagaacaaacttacgaattcgcattggataaagatttgaaagagcttaacagcgttcaaactaacacaatccacttaggtagcccaacatctcatacaactattaactacaatgcaggtaatgaacgtatcgagtacacaactaagaacggcactaaacaagtagctaacttagatgatatttggactatccaagctaacggcacagacgttaaacctgtaggcggaaaagttaatgttgtaggcggcgaccacatcaaagtttctactgatgcagctggtaagatgacaattagtgctgacggcgttggtactatgaacggcttcaatgttaaatctactggtaatactactaacgattccgataaaacagctaaaaacatcactgatggtaaaactgtggaattctctggtggtaagaacctcactgttaaacaaactaacactgctgacggtgcaaaagtagaattcgcattgaacaacaacatcgacttgactccaaatggttccgtaacaattggtgatacagtagttaacaacgatggtttgactatcactggtggtcctactatcactaagaacaatgttgatatgggtggccaacaaattcacaacgtgaaatctggtggcgatgtagattccaatggcgctaatattggcgatattaaacgtatctccaaagctaacgatactcgtatcaaagacggtaactacgaagttagtcaaaacggtactgttgaaatgacatatgttgatggttctggtaaacaattagttgacgaacacggcaatcctgtgaaagcaactatttccggtatcgctcgtcaagacttgtccaacattactaacgaaggtaaaaaggttatcactggccttggcacaatcgtaaaagctggtcaaaacgtatccgttgatgaagcaactgataatgcaactggtcaaaaaacatacactgtaaacgctgatctttctggcgcgaaagtttatgctggcgttggtacagatggttctggtgtggctaaaggccttaagaaccctgaaaaagttgaaaaaggtacgcaatacatcgctggcgacaacatggttgtagaacgcaaacatgttgatggcgacgataaacttgataactccatcacttacagcttgtctcacgacttgactgaaatcaactccatcagcaatggtggtgcaacacttagaatcaactctaaccctggtagtgttcctggtgatcgtgctcctgcaacccctgcatttgaagtacatggtggtaacctaagcatgactggtaatcgcatcgttaaccttgcacctggtatcgatggtactgatggcgtaaacgttaaccaattgcgcgattccttaacaactgttaaatctacagatggcactgtacgagttacagatttaagcacagatcctaacaaacatgaatacgatttacatgttaaccctgcagctgaccctcgcgtagataaattaggtgaagaaatcggtcatgtaggtgcacaatctgctgcattatccgcgttgaaacctatccaatacgatccaatggaaccaactcaaatcatggctggttatggtaactatcgtggcaactctgcattggcattgggcgtagctcattacaagaacgaatccacaatgttccatgcaggcgtgtcctgggctggcggcaacggacatatgatggctaacgctggtgtaacttggaaggttggcaaccgcgatagcgaagctgctgtagcagatcgttaccgtaagggtcctatcagctctacatatgcaatgcaaactgaagtggcttctatgaaagcacaaaatgccggattaaaaggcgaagtatctgatttgaaagccgaaaatgaacaaattaaggctcaaaatgcaggcttacaaagcgaagtagaccaattgaaagctcaaatggctgctatgatggctaaattaggtatgtaataagatacacatggatggggattctccttgaatcccctaccatcgctaatattcgacaatgaaaagaggaatagatatgaaaaaatctacaatgcttgctttcacagcagcagcacttatgagcgctgcatccattacaggatatgctgctggctcaccaacatatgatgataatttgattttgcctaactctgcttctacaccaactacaggtcctgttgtactcgttcctgtggctagcccacaaacggtacaagctttgcatacatttgtacaagcatggcaaaatgcagaagttaactatactaaagctaagattaaacatgacaatcatgagcaattgactaaggctgaaagtaaatggttacattctaaggataaacataactatgcggactacttccgcacacattccttgggacgtgttcatggctttgaagtcgcattcaactggaacggcgaaaaccgtaacaaaaatgaatacgaattctttgatatgccaaaatacaatgaaaaagatggtttcgtaaatagctacggattcaatgtattacgcggcatggtagaccaaatcaatgcagtcgttcaaagacaaaaagaaatcggcggtcctatgactaacgatgaagcaagtgctttggaagacgcaatcttggatatcatggctcaagatcaagaacatgtgaacaacgaagaccttcgtcacatgatgaacgaaacaatttggtacgcagctaaagaaaccgtaaaaaacaaagcaagtgaagagcctactgctactgaagaacatgtagtagaccttcgcaaagcaatcaatgagccagtggaaccttccgctcctcacacaattgatttgcgtaaagcaattcaacaataagattgctgaccgtatatcttaaaaaaacaatatggcccctcatatgctgatataggggccgtatataccctagaacccctaactagggcacaaataatccttatacgaatgacgccacccttgtgggtggcgtcatttgttttataaaagaatgtaaatggtatatcagataagacgttaagttggatcagtgggttatataaacataatgataagttagataaacatattatagtattatacagtgttaattaattactacaggcctgtactaattgtaggatgacagctgtaaggcctcttaagaaatagaacaggcctgtactaaatgtagaatgacagttgcaaggtctccagagaaatagaacaggcctgtactaaatgtaggatggcagttgcaaggtctcccaagaaatagaacaggcctgtactaattgtaagaagggtgttgcatggcctcccaagaaatagaacaggcctgtactaattaatagatataactgaaactaattagtggaatagcatatattgtatttatagtctatagaaatataaaaagggggctatcaaatacaatatatagtagtgccaaaataaataaatacattatacagaaaaggtgaaaaaagtttcaaattttttaaaattagggcttgcgcgcatctcttgtttgtactataataaccatacagtcgttgaggcgactgtttcttaatgaggaaacactagatacaatctagattctttgttagttattttggaattttatgtaaatccctcatatagaggtaattacagaattctaaaaaagattataaaaagtgcttgacactgaatggtcaacatgttattataatctagtcgccagttggtgaaacacttcaaacgaaagtgcttcggagctagataatatctggtctaactggtacatctttgaaaactgaacaatgataggtaatcaatcatatgattgaacatatgccagagtgcgggttttgacatagtcaaaaccaaccataattcaaagttacttaaatgtaacgacaacacataatgagctattcaaatagcttcaagatatcttggagagtttgatcctggctcaggacgaacgctggcggcgtgcttaacacatgcaagtcgaacgaagagcgatggaagcttgcttctatcaatcttagtggcgaacgggtgagtaacgcgtaatcaacctgcccttcagagggggacaacagttggaaacgactgctaataccgcatacgatccaatctcggcatcgagactggatgaaaggtggcctctatttataagctatcactgaaggaggggattgcgtctgattagctagttggaggggtaacggcccaccaaggcgatgatcagtagccggtctgagaggatgaacggccacattgggactgagacacggcccagactcctacgggaggcagcagtggggaatcttccgcaatggacgaaagtctgacggagcaacgccgcgtgagtgatgacggccttcgggttgtaaagctctgttaatcgggacgaatggttcttgtgcgaatagtgcgaggatttgacggtaccggaatagaaagccacggctaactacgtgccagcagccgcggtaatacgtaggtggcaagcgttgtccggaattattgggcgtaaagcgcgcgcaggcggattggtcagtctgtcttaaaagttcggggcttaactccgtgatgggatggaaactaccaatctagagtatcggagaggaaagtggaattcctagtgtagcggtgaaatgcgtagatattaggaagaacaccagtggcgaaggcgactttctggacgaaaactgacgctgaggcgcgaaagccaggggagcgaacgggattagataccccggtagtcctggccgtaaacgatgggtactaggtgtaggaggtatcgaccccttctgtgccggagttaacgcaataagtaccccgcctggggagtacgaccgcaaggttgaaactcaaaggaattgacgggggcccgcacaagcggtggagtatgtggtttaattcgacgcaacgcgaagaaccttaccaggtcttgacattgatggacagaactagagatagttcctcttcttcggaagccagaaaacaggtggtgcacggttgtcgtcagctcgtgtcgtgagatgttgggttaagtcccgcaacgagcgcaacccctatcttatgttgccagcacttcgggtgggaactcatgagagactgccgcagacaatgcggaggaaggcggggatgacgtcaaatcatcatgccccttatgacctgggctacacacgtactacaatgggagttaatagacggaagcgaaaccgcgaggtggagcaaacccgagaaacactctctcagttcggatcgtaggctgcaactcgcctacgtgaagtcggaatcgctagtaatcgcaggtcagcatactgcggtgaatacgttcccgggccttgtacacaccgcccgtcacaccacgaaagtcggaagtgcccaaagccggtggggtaaccttcgggagccagccgtctaaggtaaagtcgatgattggggtgaagtcgtaacaaggtagccgtatcggaaggtgcggctggatcacctcctttctagggagacatacaccaggccaagagcttggatgtcacttaggtcgacactttggccagtaagtagacgtagcatatgcgctagctgtacttacaacctacattgttcggttttgagagatttgtaaatgatttctcaatttaatatgacgtataaattacgcgttaatctaggcgcatgagttgaacgacgtcgccacgtaatggtaattacgtaagacaagtgaaacgaatgcaacgacgagtaacacggaatttatcggcagatttgttctttgaaaactacatagaagataattattatatatatttgtaaggtcatctcttagaatttctaagtaggttgacccgagcacataggaaataattctctgacttattggtgacgtacatgaaaatgtacggctacaaaaaacgacaatgtatctaatgcatgtcataaaatcttaagtaaagattttaagggcgtacggcggatgccttggcgatatcagccgaagaaggacgcggtaagctgcgataagctacggagaggtgcaagcaacctttgacccgtagatttccgaatgggggaacccggcagtggttatgcactgtcacccatacctttgagtatgaggagggcacctggggaactgaaacatctaattacccagaggaagagtaatcaaacgagattttcttagtagcggcgagcgaacgggaaagaggccaaaccggagcgggcaaccgcatcggggttgaggacagtcatcaagtgtaaatgaggtagaagaattgagttggaaagctcagccgcagaaggtgaaagccctgtaatcgaaaccttgcatacatgggactgtatccagagtaccacgagacacgtgaaaccttgtgggaagcaggggggaccaccctccaagccaaaatactgatatcgaccgatagcgcatagtaccgtgagggaaaggtgaaaagaacccctggcggggagtgaaagagaacctgaaaccgtatgtctacaaacagtcgaagtctgtatatatatcaggacgacggcgtgcctattgaagaatgaaccgacgagttactgttgctagcgaggttaagtggaaaacatggagccgcagcgaaagcgagtctgaacagggcgttcagttagtgatagtagacccgaaaccgtagtgatctatccatggccaggttgaagcacaggtaaaattgtgtggaggaccgaactcgtgagcgttgaaaagctttgggatgagttgtggataggggtgaaatgccaatcgaacacggagatagctggttctccccgaaatagctttagggctagcctcgaggttgagagtataggcggtagagcactgatcgggctaggggccataccggttaccgaacctagtcaaactacgaatggctatacttatactcgggagtcagacagtgaatgataaggtccattgtcaagagggaaacagcccagaacaccgactaaggtccccaatgtcatactaagtggcgaaggatgtggaatttccaaaacaaccaggatgttggcttagaagcagccaccatttaaagagtgcgtaatagctcactggtcgagagactctgcgccgaaaatgtccggggctaaagtatgaaaccgaagtcgtgtcatatgcagcaatgtatatgggtaggggagcgttctcatcggattgaagcagtaccgtaaggagttgtggactggtgagaagtgagaatgtcggtatgagtagcgaaaagaatggtgagaatccattccaccgaaagcctaagggttcctgagcaacgatcgtcgtctcagggtaagtcgggacctaagccgaggcggaaaagcgtaggcgatggacaacaggttgaaattcctgtaccggtgtgaatcgtttgattgaaggagtgacacagtaaggtaggtcagcacgcgattggaagtgcgtgtttaagcatgtaggttgagttataggcaaatccgtagctctaaaagctgagatgtgatgacgagctgtttacagcgaagtgattgatcctacactgtcgagaaaagcttctaggtagagacacatcgcccgtaccaaaaccgacacaggtaggcggggagagaatcctaaggtgcgcgggaaaaccctcgttaaggaactcggcaaaatgcctccgtaacttcgggaaaaggaggactcatgtagtgtgaagggcagtaacgcgtggagcatgaatgagtggcacaagagaggcgcaagcgactgtttaccacaaacacaggtgcctgctaaagcgaaagctgatgtataggtgctgacacctgcccggtgctggaaggttaagaggaggggttagacttcggtcgaagctctgaattgaagccccagtaaacggcggccgtaactataacggtcctaaggtagcgaaattccttgtcgggtaagttccgacccgcacgaaaggtgtaacgacttgcgcactgtctcaacgagggacccggtgaaattgaagtacctgtgaagatgcaggttacccgcgactggacagaaagaccccatggagctttactgcaacctaagattgaacttagttaatgaatgtacaggataggtgggagacttagaatctagggcgccagtcttagaggagtcgttgttgggataccaccctttgattaattgatttctaacaggccgattaacaaccggctggacagtcttaggcgggcagtttgactggggcggtcgcctcctaaagagtaacggaggcgcccaaaggttccctcagagcggacggaaatcgctcgaagagtgtaaaggcagaagggagcttgactgcgagacggacaggtcgagcagggacgaaagtcgggcttagtgatccggtggtgccgagtggaagggccatcgctcaacggataaaagctaccctggggataacaggctaatctctcccaagagtccatatcgacggggaggtttggcacctcgatgtcggctcatcacatcctggggctgaagtaggtcccaagggttcggctgttcgccgattaaagtggtacgtgagctgggttcagaacgtcgtgagacagttcggtccctatccatcgcgggcgcaagaaacttgaagggggctgctcctagtacgagaggaccggagtggacgaaccgctggtgtaccaattatcctgccaagggtacagttgggtagctacgttcgggacggataaacgctgaaagcatctaagcgtgaaaccagccttgagatgaggtttctcatagcataagctagtaagatcccatgtagacgacatggttgataggccaggtgtggaagagccgtgaggcttggagctgactggtactaatagatcgagggctttacttaatacaataagcagaaaatgtgcaacaaatatatataacttctatgtggttttcagagtacaaactctgacagattcagtggcgatagctacgagggtccacctgttcccatctcgaacacagtagttaagctcgtaaacgccgaaagtacttggctggagacggcctgggaggataggaagtcgctgattaagctaaaaggcacaccttagagtgtgtctttttttgttgtatggcttcctatcctcctagtccgtctttactattctaatagcccacccttgatatattgaaaaaattagatataatagcattaagatatatgagcaactattcatatataatacaactattataaatcctgttcgattaagaggtgatagaatgaatcctgtaagaacaattgaaagaattattaaagctcctgatattcattgggtaggcaatggatttagagcacgtcagtacttccctgatggcgatgagtcacctatgcttgatcgtatgtctccatttttgttactcgactataacgagccatattattttgaggctagtccttttgatacaggtgtcactccacatccccataaaggctttgaaacggtaacattttctttttccggctccattgggcataaagatgcagctggtaatagtggtgttattcactctggtgatgtgcaatggatgactgcagctagtggtgttttgcacaaagaatttcatgaaaaagaatatgcaaagcggggacgtttgttccatgctttacaattatggataaatctacctgaacgtcataaaaacgatacacctgcatatcaatatatacctgctaccacaatggggcggtatcaatctcttgatgaaacaatcgatgctattgtttacaccggtgctttcagacatataacaggtcctgctaaatcccatacaccgatgaatatttacaaattaaaacttcaacctaattcatggatctctatttctgagaatttatgacaaataaaacagagcttatcctcgcttatggggaatacaaaaatggtaaattcggtcgtgaagaagatattatgtaatacgtatataaatcttactccacaagatttgatatagtattacaatataatgcaatataaatacgatagcccctatcataattagtatgataggggctattattatataaaacttattttcactctcttatttaatgcgaaagcgattttgctaagtgtatcaatacttgtattataaccacgttctattctagcaatggtagactgtgggacaccagaacgttctgctaattcacgttggcttagccctgcattctcacgtgctcttaatagtgcaattgcattttctaatttagcatcttcttttaaaaagccattttcaaaagcaggatttttccgttgctctgctaaaaattcaccaaattttattgttggcatattgctcctcctcatattcctttttaataactttagctcgctgtatttctcgacttggtgttttctgagttttctttgtaaaaccattaggtcttgtataaaattcaaacttcggtttttccattaatcacccttctttctttatgatagcatatattggttcaaaccgatagcatatattagttcaactataactcttttcttttacattttgtagcgcaataatttaatgagcataagggcacaaactttaatgatatatattctatattttctgtattcataatttttatcaatttggtgtgatataatatgcataatattatgtatgttacctaaggagggtttatgtctaagaagattgcagttcttgtgaacgaagacacgatgcaacgttgttcttgcggtggttgtcttaaggcatatatgaataaagtggattcttttgagcgctatgcagatgaggatactgagctagttggttttacccatagcggtggcgatttggagaagaaattggcttctttcaagaaaaatggtgtcactaccattcatctttcgacgtgtacacgtggtaagaatgacaattatgaaagcatagctcgccaatgcgcagcagctggatttgatgtggttggatacactcatggtagtgctatatctaaagatggtaaggtagccattgagcttgttggtgaatctaagtaagactgcatttattttgagagacaatgagaggttcaaatatgaataagaaaattaaatctttggtactagccgccgtgatggggctttcattaacaacagttgccgtagtacccacaacggtagaggctgcttctgcaggggctgcggaaacgttaattggtggtgcagtggcatatgcatatgtatccacggctttcaataaaatggataattctaaggaaggccaagaacaaagcttagctcgcgcaaagaaacaaactggctatttagaggatagtgcggcgcaagcacgagtgcaacgtatcatgaagaccttagaggcttcgcctagcgttaagcgttcgtatgtggtgtacgcaaatcctagtgatgatttcaatgcgttcgctacggttggtcgcgtgatgtctgttaacaagggcgctttggatctattagatgatgatgagctcgcttatgttatggctcatgaaatttctcatggcgagcataaggacattgtcaatggtctcaagaagcaagtaggtttatctacagcggtgagccttgctgctggcggtggcggtaatgcggctattttgtccaatattgctggtaattacatggagaaccaagtattcacgatgggccaagaaaaggcagctgacgaattgggctttaagatcttgagcgagtctccatataatgtgggggctgctgctgcatctatggcggtgcttcgtaataaatacggtgatttgtatcgcgaaggcttgaaccaagtgttcagtcctaacaatcaccctaagacgagcagccgtgtaaaggacaatattgatcgcatgtatacgtattctggcaatcacgttacggtcgataatggcgcggtattcgtgaatggcgtgaatatctatagccctgccaatagcggtcgttatacgggcgaagaacgagcttatttcatggctggtaaattggcgcgcttgtatcataatggtcaaattcagctaggtggtgcatcttatgatggacctactgtgaccgtggcaggtcgttctattgtcacaactcctaatgctgatgtggcccttatggtagctaccaatttgaataattcctttgtgaaagccgcaggccctgcgaaaggcaaacaagcagcaaaacctaataagaaaaaatctagtaagaaataattaaacaagatctcatttaaataagaatataatacgatggtgacatacttttggttgtagtttaccaaagaaatcgtatgactcgtaagtgatatatggagagagaccgcttatgaagaagataaaatggattgtactaccgtatatagtcatgggcatttgtattgccataggtttagttattgggatggcgccagagttgttaggcgatgttataccgaggcatggcgtgataggtcggatgttaacggctgcgaatcaccgaaagattcaagatagtcaacatacagagatggtcgtgccggattatgtgcgccgcgtcgttacgttgggaaccggaacggtggacttggttggggctgctggtgagccttatgttgtggccactgatggatctccgtatagttctggtacagagataaaggggcgtgtgcagcctacggtggagtctataaaagcctatgaaccggatgtggttatcgcaccggaaacgacgccgccggggttagtggcatcgttgcgtgccgccggtattcctgtatttatttatacgctgaaagatagtttaaaggatgtaacccttaatacgaatcaagtggcgaagttgtttgataccaaaaatgcggaatattcgattaataattctgttatgaaggtacgaaaacaggtggagcctcataaaaatgatgtgaaaccggtgattgtgttatataatccgacgcatggtttgtatcgttcaggtatacttcgggatatgattgaaatgattcatggcatcgatggtgcaggaaacttgaaaatcatagagcgtggtaaggatcctaatgttctatctgatgtttgggactatcgggcgagctatcctactttcaacatgcaagaaaacatgggcacaaaagcggatttgattcgcatcaatcctgatgttatttttgtgcctaccatatattcggtcaaacaacctgagtataagcaggatatagatgctattatgcatgatccggacttgcagaatataacagctgtgaaaaagggctatgtgtatcctattaatgacatgcacatcatgagctattcgtcgtggatgtattatgaaatggaacagatgtcgaaatggttgtatggcgattggtcgtataagaattatgtaaaataccaaagtgtgccatctaattaacgatatagatcttatattgttgctgctagtttacagtgtattgcatgatgagatttttttgaaagcataggaggagagcttatgcaattacgtcgtttgatgattgttttggctatttgtattgtggggctggtggtagcagcttttggtatgtaccgttcttggcaaaactttacaagtggagacctattcggcatattaagctctcacgggcactatatgatggtggatggaaccagcacaacagttacattagatcataaggcagagcgtatcgtcgccgtagggcctaatgtggcggatttggtgagcgaactggccggtgattccgtagtggctactaccgcagcaccgtatcaagtgactaataccgttaagcaacgggtggcgcctgatgtgaatgctattgtggcgttaaagccagatattgttatcattgaggatggcgctgaatccatagaactcgttagtccgttgcgagaaaagggcgttaaggtagcattattaagagagcctgcgactgtgaaggacgtagaggaccagacgcgcaatgtaggtaaattactaggccgtgaaagcaaggcggatagcctcatagcgacgatgatgaactacatccgcgatacagaatcgcttcgttttgcgcaccgcgacgatccaaagcagactgttgctgtgtataatgaaaacggattatatgggaaaccgaaaaccttgattgccgatatgctcacctatgtgggcgtagataatgcagctgctaagagcggagtgaaacaatctaactttggtacaaaggcagaccttatcaaggccgaccctgatgttatcattgtaccgatggacatacatgcaccggattataatcgtgatgcaatctatgccaattactataatgaccctgtattggcgaatttgaaagctattaaaaacaaaaaggtagccatcgtgtctacggatgctctattggccaagagttaccatattggacgaggtatttacacaatagctcaagtggtgtatgcaagatagtgtattgataggcaagatattgtttatgtatcattatttcgtagcgagaggatgcacatacataagttttactatgatgatataacggtctcataggatagtttaaacgaatggttatgcagatatgaataatattcataaaattgtatagaattaataaatatgtacttgatagaggtgttatgttcagcctcttagtatgctaagaatttagataatatctgtataggcagtctatagaaaacatttctatagactgcttttttttatatgtattgagagcagataaataatttttagcatgagaattattagtgtttttatataatagacaaatgtatgtattcaatagagaaattagtaattataaaaatacatacagtaaaatatcatacctatacagggtataggtttattgtgctacgtatttgtttatgaaataataaaataacttagtgttaatcgtaatataacgattaatacagattgcatttgtgttttatacgcagtagagtacaaatttataattataagtttgaggaggttattatggagtatgcaattcatctttttaatgcgggtggcgtagtcatgtatccgctagttttatttatgttggcagcatgtacgattttatttgagcgaattcgtatgtatcgtcgcattgacagtgaaattcaacaattgtcgtctagcattgaagcaggtcgtaatgcgaatgattggattgcattagaacaagcgattaagaataatgatgatgcacttagtcaatttgtaacaccgattgttgattccgtatataactttgaaggcttagaaaaccgccttcatgatgtagtagggtatatggatgaacgtttaaaacgcggtcttaactggctcagcatgatggttactatggctccattactaggtctattgggtactgtagtcggtatgattcgctcattcgctgctgttggtggcgatatcggtgcccctactgttattactggtggtgtatccgaagcgttgattgcgactgctacagggctttcagtagccatcgtagcattagccatccacagctggtgcacaagtaaagtaaattatgatattgcaaaattggaacaacgcttaggttctatcttggatttatatattaggagtcaacgatgaaacgtagttcagtagggatacaaaaagaacctaccatcatgattatacctatgatcgatattgtatttttcttgctcgtatttttcatgatgagtacgttatatatgaatacagaggaacaaattccgctcaatttgccaaaggcctctgcatcaacggcaaaaacgattgagccgattacgatttcgctcacagctactcataagatgtatttgaacgaacgtgaaattagacctgatgatttgggcaatgaaattcaaggcatcgttgcgaaggaaccacaacaagcttttatcgtccgtgcatctgaagatattgcgtataaggatgttattagcattttggataatctcaagatgagtggtgctcgatttgtcagcgtagcgacagaacggaagtgatcatatggtgagtaaacgatatggcattccttttatcgctgcattggtggtcaacttagcatactggggtgttgtaggcgatttgttcggccatttaaaaccaccagaaacgccaaagaaagatttggtcatcaatcttgacatggtgcaaccggaacctcctgagcaggagaagaaacagcaagagaaaattgtctctgatgataaagaaaatgctgcgggcggtaagtcgggtagtgtattaccggatttatcgggaaaaccgacaccaggcttgcaaaatcttaacccttatctaggtggcaatgaaacggctagtgtaaatctacatgggaatacagataatcctgtaggtgttcccggcgatggtgatacaacaggcccgggtggtggccccgttggcaatggtggaatagcaaatgacggccctggtacacagagcggcaatcctgggactagtaatacggaaggttcgggatactttgatgtttccggttatcgtgctagtttagatgccaataaagtcatgccagcacaagctgtacgtagaggaattacagggacagttaccattagggtttattttgatggcgaaggtaattatgtaagggctgaaattgaggggagtagtggttctagccttcttgataatgatgcccttgcccttgcagctaggtcaggtggggctaccaatacaactggtgagcctaaatcagatgttttttatataagatatgaatttgaataatgattatatttggaatgagcctaaattgaattaaatgaattacagtttatgtagtggatatgagaaggttcatatccactacaaccaaattgcccactgtagtttggaggctacaaattaacagaattaacaaagttttaataaaacatataggatggtgaatgaaatgaataaacgtgtatatgtggccacaatgatggcgttacttagtatgagtgtaaatggttatgcggtagatatgacaactaatgagaatcaagagtcgtccaatgtaatcaatgttaccgctaatcgcacagccctcctagatttggacacacctgtagcgatgaatgtaattacacctgaggatttaaaaaatactggtgctaccactgcttttgatgcggtggcgaccgtaccaggggtaacaataaattcttatggtgccggcggtgccgattttggtggcatggatagccgtacgaatattcgaggccttgaccgtggtgcccttgttcttgtaaatggcgtgcctatgaacctcaatggcaaaggtggactcggctctattcctacgagtgccataaaacgtattgaagtagtgaaaggagctgcttctacattgtatggtgcagaggcattaggtggtgttattaacgttattaccaagactccatctacagagggtggctctgctacagttgctgtaggtaatcgtgggtctaaacgttttgatgtgtcttatggtacagataaattcatcgttggtattgatagaaaatattgaggtacacaggacccatccacaccgattcgctacgactatgcaggtactaaacactacgattactatagtactcgcaacaagggcaattcgttggggctctttatgagtggtaagctttcagataaggtaacattgaattttaatcgtgctgaaagtaaatcgtcctttggtctaatcagtacggaaacaaatccggttaatcaagcaagacattctacgacgtatcattataaggatgatcgcaataatgcttccttaatttataaggacaagggtactacaggaaccttgttctataatgaccgtacgatgcgtggtacgagccgggtgcacaatacgtcccaagctaaggcaactgaaacaagctatcaagcacgtcaatatggatttgatgtacagcatgaatgggatttcagaggcggtaaggattatttgatagccggtgttacaggtaagcaagaaacctaccatgcaacggctgtacctgtgtatatccatccgaaacgcaatagttatgctgtgtatggtagttattcttatgaaattacccctaaatggacatccattttgggcttgcgttacaccgtaatcgatgatccaatcaaggatcaacatgtgttgacccctcaattccaattattgcactccatcaataaacaatcttccatgtatgtgaacgtagggaaagctttcacaatgcctagcttgagcgatacattccgtagcgttagccgtcggtatacagcggtaagcagtaaaaaccttaaaccagaagaaggttggaactatgaaattgggtacaagcggattaacaaaaaggatgattggaaggttgatgtgttctatatggatttcaaaaacttcttccaatggcaaccggatgcaaatggtcgacctttggtgcgagtaaatggagggaaattccgcaacgtgggcatcgaagccgaatatggtagacgtttatccgaccgcctcaaatggaacgtgagcggatcttactctaatccaagacaaaaggaattgaatgaaaattactggaaacaagcggcccctaaattgcaattcactacaggcattcgctatgaaagcccaacctgggaagcaggcacatcctttagctttgttaccaaacggttgcgcaatcgagatggtggcttaaaccctaatattgccctttggaatgcgtatgtaggttatcatttcaacaaggatgcaacacttcgtctagatgcacgcaatttgttagaccgtcacaacgttatcaccaatggggattatgaatactggggtgatccattcacatatgaattgagttatacacaaaaattctaatatttatttgtagagctttatataaaatccagtactaatagggggtatgggttttgtgtagcccttttaaatgtgtaataatacaattatgtagtttttatgaataattagtgtgtattacgagggatttgttatgaacaatcttaagaaacgacggacttctgtacttataggattggctttgatgggattatctgtgcatgcatatgcagcggatgtaacggctgccacagatactcctactacggtagcatctactgaagcaaatggcgcatctgaaagtcatgtcattaatgtaacagctaatcggatggcattgttaaacctagatacgccggcagcgatggatgttattacggacaaagatatcatgaatagcggtgctaaaaatgcctttgatgcggtgaacatggtgcctggtattacatctttctcctatggtgcatctggccttgaatatggtgccatggatagtcgggtcaatattcgtggactagaacgaggttcactcattctcgtcaatggcgtaccgatgaaccttaatggtaagggtggtcttagctctattccaacaggttctatcgcccgtatcgaagtgttgaaaggcgccgcttctgctttatatggttctgatgcgatgagcggcgttgttaatgtcattactaaaacacctactaaagaaggtggctctgctactattggggtaggcaatatgggtagtcaaacctataaaatcaactacggcacgccgcgtttcttgattggtatagaacggggattctttggtaaacaagatccgtctacaccagttcgtacagattcggtggatcaccctcgtgggtatgaatactatacagcacgggataaggggaattccttaggtatatttatgagtggcaaattgagcgacaaggtaacattgaactttagccgctttgaaggtaagtcggcctatgctcagttgagtactgaaagcaatgcgacgaatcgcaatcgccactctacaacatatgcatatgatgattctaagaacaatgcgtccttgatttataaggatggaaatacgacgggcacactcttctataatgatcgagatttgaagggaaaaaatcgtaaacatagtcttccatcctatacatctaatgatagtaactatattgctcgccaatatggttttgatgtacaacacgaatgggattttagaggtggcaaggattatctaattgccggtgtattgggtaaacgtgaaacgtaccgcactacatcaggtcccgtctatgcaaatcctcatcgtcatagcttagctctttatggtagttattcctatcaaatcaatccaaaatggactactgttctaggcttacgttatacggatattaaggaccctgtgaagaatcaacatgtgttgacaccacaattccaattgaatcaccgtatcaataaagaatcctctgtatatatgaatgtaggcaaagcttttaccatgcctaatctaagcgatacatttaaaacagtaaaccgacaatatcaatcggttagcggtcgtaatctaaaacctgaagaaggttggaactatgaattgggttacaagcacattaccaataaagatagttggaaggtagctgcattctatatggatttcaagaatttcttctcttggaaaccagatagcaatggtaaaatgacgattcgtgtcaacggcggtcgctatagaaatgtaggcatcgaagctgaatatggtcgtaagttgacagaccgattaaaaatgtcggttggtgcatcgtattcgaatccaaaacaaatggaaatcgataaaaattattggaaacaagccaatccaaaattacaatttacagggggcattcattacaatagttccacttggacagctggatctagtataaactttgtaacaaaacggatgaagaaccgcgatggcggcatcaatccaaatcttgtagcgtggaatgcgtatgtagggtatcagttcaatgaaaactcttctatacgactcgatgcgcgtaacttgttgaatcgtcacaatgttatttccaacggggattgggaatactgggatgagccattcaactatcagcttagctacactcaaaaattctagattactataagtctgtattagaactatacaaggagtatcatcatgaacaagagcattgtgtatcttatatgtctgatggtactcctttttgtaggtgtaaccggatgtgggccacaagatgaaacgcggacttttccaaatacccgttatgttgaaagttatgatggtgttagtgtagctgtgccagagaatccgaaacgtattttagcattatcctctgcgtcggatacgattttattaggccttgtagaaccagaccgcttggtaggtattaatacattatctacctatgaagagtattctttagaggcgaagcgtgctaagctggttaaacctgctatgagttcttatccattagaaaaaatcattgccttggagccagatcttgtcatagcacctgattatacgagcgcagacgtcattgcaggtttacgccacatgggtatacctactgttgtagtgccaaccggtactacggtagaatctgtcattaagaatgtgacggacatagctcatattgtaggggaagatgaaaaggggcaattttacgagcagaaaatccgtcgtgaactagaaaagatgaaacggcttggtacatctattccattgaatcaacgcaaaagcgtactcttcgtatcatccatggatgggtacaccggaacaggcagtctgtttgatgatatgtgcaagtatatgagcatctacaatgcacctgatcttcttggtttaccgccacggactccttttggagatgagcgtgtattggctatggatccagattatatttttattccatcctataaaggcatggataagaatttagctagtcggtatcttgataatccagcctttcaaaacctgcctgctataaaagaacatcgcgttaagcctttaccggctgcgtacttatatactatgaatcagcatattggtgaagctatgcttgctattatgcatactgtgtatcctcagttagaaaggaatcctcatgactaaacagaaacaaaaaatcatggcaattgccataattgggggattgctatgtattgtaagcctattggcgctacatgtaggaacgattatgattcctatcggtggtggcatacaaagtattttaaatggtatggggataccggttcattttacagctccgattacagctgaacaggaggcggtattgtggtttatccgtatgccacgtctcatcattggtctccttgtaggtggtgcattagccttggctggtgccgttatgcaaggcgttttctccaacccattagcggatcctggcattatgggtgtatccgcaggggcatcccttggcgcagtgatcgccattgctcttggcgtaacatctcttggtatgttttatatgcctgcctttgcctttgttggcgcctttgtatccgttggcattactattattttaaccttgcgtaataataagctcgatacgacgaccttattgctcgctggtgtagctgtgagcatgttactcggtgcttttacatcgggtattttgacgatgattaacgaataccggttgcgtgaattcttattctggatggttggtggccttgatttccgtcgttgggatcatgtggcactagctgtagggcctatcgtgacaggcagcgttattttgatgatgctcggtcgtcatcttaatgtactcgttctcggtgacacagaggcacgggcattgggcttacctgttatggtgtaccgtatgctattcttattccttgcatccgttgttaccgctactgctgtatgtgtcagtggttctattggctttgtaggccttgtggttcctcacattgtccgcctcttagtaggaccggatcatcgcatattactgcctatggcagctgttggaggggcattattcctcgtattctgtgatacattgggccgagttatagcacaacctatagaaattcgtgttggtatcatgacagctctcttaggggcaccatatttcttatatttactacatcgtttgcgcagcaaaggaggggcctaatgaaactagatgttcaatccttatctgtcacattaggggaaacagctattctaaaggatgcgtccttctctattgatagcggtgaatttgtcggcattattggccctaatggatctggtaaaacgacgttgttaaaaactttacgtggcctctatcctgcatctggtggtcaggttttatgggatggtaaaagcattgcctccatgagcgataaggatatcgctcatcatgtggcatatatgcagcaatctgtaaatgtttcctttgattatgaagccattgatattgtgatgacagcgcgttacccttatttgaaatggtggcaacaagagggaccagaggataaagctatcgtagaaaaggccatgaaagaggtgggcgtatatcacctgagacatcgctccgtacaaaaccttagcggtggtgagcgacagcgggtatttttagccaaggcactggcacaacaaacagaggtgctattactagatgaaccgacggcggctcttgatttagtgtacgctgacgatatctttcacgaaggtcgtagattatgtgacgaaggcaaaacgattctaatcgtcgtccatgatttagaattggctgccaaatattgtactaagctcgtcttggttagtgatggtcatatagttgatgtaggaacgcctcgtgaagtgctgactgcagagaatctacgaaacgcattccatctatcggcagcggtctacgatgatccatactttaaacaacaacgtatctttgtattccctaagggaactacaaatattgatgattttaaacaaacaggtggtagtacagacatgtctatcgatcctgcgttgaaataaaattttttatcatgagttgagataagatgtttctatcctaaatgaggttaggcttatgttatatccatttactgctattgtgggccaagatgaagtgaaattagccctgttactcaatgccataaatccatctgtcggtggtgtgttaatcgagggggaaaagggtactgccaaatctacggcggttcgtgctttggcgaacctattaccgcctatggagacaggggctacggccatgactgttgtggaacttcctatcaatgctacagaggaccgtgttgtagggtctatcaatttagaaaaagcactacaggacggtgtgaaagcttttgagccaggcattttgcacgcagcacatcaaaacattctctatgtagatgaggttaatctattagatgaccatattgtagatattttacttgacgtagcagctatgggtgtcaatacggtagagcgtgaaggggtgagccactctcatccatctcgttttatcctcgtaggaacaatgaatcccgaagagggtgaccttagacctcagctgctagatcgtttcggtttatccgtcatggtctatggtgagcatgatccagcacaacggatggaggttatcaagcgtcgtcttgcctttggcgacgacccggtaagtttcgtagcgtcttatgcggaatcggaacgagcattacacgaacgcttattacaagctcgtgaattattgccaagcatcattcccaccgatgaggtattgttgaaaattgcaagcattagtattggtgttggcgttgatggtcatcgtccagatattacgatgatgcacaccgctcgtgcacatgcagcctttcatggtcgccatcaaatcacagagagcgacctcaagatagcagcacgattagcattgaagcatcgtttacgtcgtttgccatttgaggagcaaggtcacgatgaagaccgcattgatacagtggtaacggctgtgcttgagggctagctatggaaacatctgtacaagaggccctcaaaataggccttgtaaacaatcagattcatactctcgttatttctggtggtactggtgtgggtaaaagttatatccttcgccagtgcctcgaagcatggcatattccctatcgtttgatacctgtgtatgtagaaaattcacaattacaagagactatcgattttgaagcatccctagagcagggccagatgattatgtccgcaggtcttttagatgacactagcactcgatgttgggttgtcgatgatgggcacgttctggcacctgaggttcgtcatgccttattagtagaggcgaagcgacgtcaaatactgctcatcatgactatcaatcatgaagatagaacactagatgatgcggagtgggaactcgttgatgtgcatgtatctatggctgcaccaacactagaatctcgtatagctgtgttgcaacaaaatcgagaagaaatcctatgtggtgaagcatctatagcaggggataatcaatcagacttggatagtgccctatgtgaggaggaaactagctcaatagatgttatttcagctgaagatatgttatctctcatagctactaaacgagttcagaatattgctgtttcggatgctatgctttcactagccatatcctatgcactacaagcacgtaccgtaggccatggtgcagaatacatattgctgcaagttatgaaatctcttgcagttcttgatggcagctcgtactgcaagccaatccatgcagaccgagccgctttatatgttttgccccatcgtatgaagcgagatgaagcatcagaatctcaatcatcacaaggggataatggaagtagtacaaacgaccaaaatcagttgcagaaaaatactgaaatagcagaggactctgatgtagataactcgagtaattcgggtggagaagattctaatggtgatgaatccaatcccaatgaattagataattccaataatgatataagtggtaccgaagatggagcgtctaatcaagacgtattcggcaacgctaatcaagaagaaacgagcggcactaatgacgctaactctaaggaacctgatagttctgattcaagaagcactgatgctgatgtatctaacgggctatcttctgtatctttgcctgatactgttgcccgtatagctaaccagatgtttcattggaaattacagtcttataagacggtagaccgccagtatcgcaagggttctggtcgtcgactcatgacgaaaacaaatgatactcgagggcgcatgattcgagcctatcaagatgaacatgctcttgaggacttggccttagtcgatacattgcgagcggcagcaccctaccaacggttgcgagctgctgttaaggtggaacaagaaatacaatctacggagtctctgccattagaacagcaagaatctaaggaattatctatagtgataaaaccacaggactatcgccgtaaagctcgagaaaaacgtattggtgcataccagctctttgtggtggatgcgagcggttctatggcggcacgtcatcgcatggaggccacgaaatccgctattttgagcctcttaagggattcctatattcaccgtgactcagtagggctcattgcttttcgcaaggaatcggcagaggtgttattgccgttcacgcgtagcgtagagcgcgcagagcgactattagcgtccatgcctacaggtggtaagacgccattagctcacggtttacgcatggcctacaccatgtgcgatagattgttgcgtgcccatcgggcagaacgcattcagattatatgtatcaccgatggacgtgctacgtcgggggattctgaggatcccgtagcagaggctaaacaatgggctcgtattcttggaaccttgcctgtagattgtatcgttattgatacggaaacgggctttatcaagctaggccttgctaaggaattatgtaaattaatgaatggcagttattacgccatggatactattacggcggatggtattttacgagtatcgcggaggtagatcatgagtcgtctcatgtatatttctaatttaggaaaacaaatccaatatatagaaaaggctattgccacctatcctgaattgatacagggtgaggtggacatctgtaatatgaaaaaacagcccctttgggatgaggattttgaaagccgcctgcgagctgccgatgtggtgctcgtaacgaatatgggggttggcttagattcgccatttttagagcgtctagagcgttggctgtatgcacatcatcctaagtattggattgatgtggtagagcctaagaaaacagatattctctatcgcaatatagacgaaaatcaacggagacttcttgaaagctatcgccgcaccagtggcgtcatgaactatgtgcgccttattaacggtgctttcagtacaaaaccaatctccgaatgggaggaacctgaccacattccgtggcaagccatcatgggccgagatggaaatatctacgaaacctatgatgagttcatggaggccgaaggaaatccagattggccgtccatcgcggtgtatttctatcgcgacgaatggattatgggggatatttattaccaacaggccttgtttgaagagatttataaacatggttacaacccgattatcttttatgggcagtatggctcgaatcctcgtgtaggcattcctaatatgaagctgtccatgaattatctctttggtaaggatgtattcccctttgatgtgctcataaatacttgtaaattctcctaccagtccttaggggcgcaaactttggaggaattaaagttacaggatgtgcctatcattcagggctatactatatacatggatgagaaaacctgggctgcagatccgcaaggcgtgacgcctttggacgtgaatttatctatatcacaacctgagcttgatggcgtcattcagggtggcgtcgtggcgtgtcaaacctttgatgagcgtggtcactatgtgtatctacctgtaaaagaacgcattgctgctattgtagagcgggccattaaatggtctaaattacgccacattccagtatcagagcggaaggtggccgttatattacataactatccgcctaaaaactccaatattgggtccgctgcaggacttgatacgcctgaatcggtacgacgactattacaggtcatgcaagatgagggctataccgtagatactgtgccagaaacgagtgcagagttgatggatatagtcacatctcatatgacgaatgacaggtctatgctcactgatgagctcttagcttctgcagaagggcgtttgagtagtgatgattacaaagcgtattttgaaacgctgccagcagatacgcaaaagtctatgatcgagtcttggggcgcggcgcctggagatgtattcgtctacgatgatgaggttattatccctggtttctccaatggcaatttatggattacggtgcaaccacctcgtggttttggggagaatgtatctgccatttatcacgacccctgtttgccaccaccgcatcagtacttggccttctaccattgggtacgaaccgtctttgaagcggatgcagtcatccatgtaggaactcatggctcattagaatggctgcctggtaaaggcgctggcctcagtgctagttgctatcctgaaattggtatatcctcgttacctaatatttacccgtactggacgactattattggtgaaggtatccaagctaagcggcgtagctccgcttgcttagtaggacacctgtcgccaccgatgacgacggccgggctctacgatgagtttgaagaattagaagccttattcgatgaacatagtcattttgagcaagagcatcctgagagtgtatcggatatagagaacgtgattcgagagaaagccatggcgtgtcatctcatcgatgaagaacaaggcgctacgatggagatggacgatcttattacagctgtccatgaaaagttaagcgacctaaagtatatgcagatgagaaatggcttgcacattttagggcaaggacctgaaggtgtagagctagaggaatttattaccgccattgtacggacgccacaaggggatattgcatcgggtcttgaaatcttagccgaagaattaggttatgattggtcctatatagagcaacatgcaggggacgtaaatgacgaggggattcgttatagtcacatcattgatcaaatttggaacgaactgcgtgcgtttgtaaggtatgtggtgaatacaccagattatacagtgccagaacggctagcgcctttggccgcagtcattgtgcgcgagtatatacctaaattagggcaaacaaagaatgagattacatccattttgcagggcttgcagggaaaatatgttgaacccggccctggtggggccccttccagcggtcaagttgatgtattgcctacgggacggaacttctatggcttagatgagcgtgcactacctacgaagatagcttaccaactaggcatagacttggcagaccaagtcattgctgactatatcttaaacgaacaacggtaccctgaaacggtaggtatcattctctgggctagcagcaactctagaagccacggtcagtgtttaggtgagtttctctacatgttgggcgttcgccctaaatggcagtccaatggtcgcatttcagacttagaggtcatcccattagaggaattacaacggcctcgtattgacgtaatgggtcgcatcagtggcctcattcgagatatgatgcctactgccattagttggcttgataaggccgtggaaatggtgtcagaattagatgagtccccagatgataactatgtgaaaaagcatattcatgatgatgtagattggctcgtggagcaaggtgaggatccttttttggctactaaaaaggcgcgacttcgtatcttcggtgacccgccacaggcctatggtacaggtgtgggcgccttgatagaaggcaaaaactggcagtccgtagaagatattgcgcaagtgtatagcaagtggagtagctttcacatacacaaggatattcctcaggatatgaggctattccaacgtcgattaacgaccatggatgtgaccattaaaaatgaagataatcgagaaacgcatattttgagtgcagacgattattatagctatcatggtggtcttattgcagcagtgcggactgcaaagggcagtgcgcctcgcgcctatgtgggggatagcaccgaccgtagccgcgttgtgatgcggtccttgtcggatgagctgcgccgcgttgtgcaaggagaaacacaaaacccgaaattcattcaagctatgatgaatcatggttacaaaggtgcatcggatatgtccaatgtggtatcccatagctttggctgggatgcgacgagcgatatagtgcccgattgggtctatgaaggttatgctaacaagtatgctttagatacaacggtgcaagactggatgcgtgatgtaaatccgtgggccttgcagcgcattgcggaaattttgttagaagccgctcaacgtggctactgggatgcatctccaaagatgctagaggatttgcagtccttatatatttccatagaaggtgttatagaaggtcgttagtatgaaacaaagaatatctattatatgtaccatagtcatgatggtacttctggtgttcggctgtggtcctaaacagctgggaactacgggcgccacacatcaggtgacggatggtacaggcactgttgttacggtgccgactgaacctaagcgcatcgttcctatcgctgctagtacagaggatatcgttttatctttggttgatccaagccgcgtagccgctgttggtacggtacctaataatgtgcccgacgcgtcggctaaggtagagaaacatgtgaaagcatctgctgagtccatgctctctgtacagccagatttagtattagtacccaattggatgtctccagatgcgattggggaaatgcgcaatatgcagattcctatttacgtgtataagacgcctacaacggtagaagaggcaaaatctgttattcacgagattgccggtctactacacgcctctgatgaatccatgattgccagcatggatgcagatttgaaaactgtagaagaattggccaataagcatagtggagaacgtcctttggtggcgttttattcccaatttggtttaacaggcggcaagggttcaacctttgatgatatgtgtaactatttgaaggtaaccaatgcggccgctcaaataggcttaggcccttttgataatgggacgcgtgaggatttaattaaatcgaatccagatattattttcatcccatcggtggcctatacttcggatggcactacgccagcaacggcagatcagctttattctgatcctgcgttgcaaggtgttaaggccatcgccaatcgtcgtgtgtatctcgtagattcctcgcaggtcatgagttattctcaatttatgacccgtgcaatggtatctatggcacaaaatatttatagtatgtaatttatagtttgatgtgtgtggaggtttttatgaaagtatcaaagaaacaacgtttatctctatatgtgggattagctcttgtatttggtagcacaattagtgcacctagcgtattagctgctgatgcacaagattctcataccattgtcgttactgcaacgcgtagtgaacaacagctttcacaagtaccagctagcgtaggtgtagtcacaggcgatgatatccgcgaacgtcacgcaactaacatgaatgaagcgatgcgtattgtaccaggtgtagatatcaatacgtatggtggtggcgtaggttacacgaattctaatgcgttccgtatcaatggttccgaccaagtactatatttagtggacggcatcaatatgggcgccgctggcgtgaatccaccgatgacaattttgaaagatatgtctagcattgaccgtgtagaagttcaacgtggagcaggttctacattatacggttctggcgctatcggtggtgttgtgaacgtaatcactgcaaaacctgaggaaggtgttcaaactaagcttcgcatgatgggcggcagcaatgatttagaacaatacgctctcttgaatgaaggtagtaaaaaggattggtactggcgtgtagggtaccaaaaagatatcatcgggtcctataaagatggtcatggcatacgcattccgcaacatggcaacagccatactggttccttcatggtaggcaataaaatcaatgacaaaaatgatgtgaaggtattctatgatacatatcgcggtgaggcgatgtactctgaccatatgggtgcccttaatcacattcgttacggtacagaagcaagtgattcattccgtgcagtttggaataataacatcaacaaacgttggagccatcaattgtacgtattagataatcattataaaactaaatatgatggttatttaacagatattaagactcgtgcgcttggtgaccaagtgacgtataaagcgaaagatcataccgtagttggcggtattgattggcgtcaagataaggtgcttaatatgggtggtgtaaaacttacgaatacatcttacttcgtacaagatgagtggaaggttgctccaaaatggactgtaattccaggtgttcgcgttgaccatcactctgcatttggtacacatacatctccatccattagcgttggctacgatgtgaatgctaaaacgaatgtatatgcagcgtataaagaatacttcttggctcctacaccatatcaactctttgatggcacaaatggcaatcgcaatttgaaacctgaaacaggtcatgaatggagcttaggtgttcatcataaattcggtaaaacttggaacagcaatctcaacttctttagtcgcagtacaaaagataaaattggttgggtaatgacaaaccctgcagcgttctcaggtgaatatcgcaattttgatacagaaaaggcgcatggtatcaatgcagatgtacgcaaacaattaacgaaacatttatctgcccgcctcggttatacatatactcatattgatgctacaccaactcgcaaagcaaatcgcgatggttatgtacctaaacatgcagtcaatgcaggtctcgattacaacgatgctaaatgggatgctcatttagatattcgcggtgtcatcgaccgtcctggtacagctgctaatgtattccctcgaaaaacatactggttggctgacattagcgctaactaccgcgtacgtgaaaatgtgactgtatttggccgtatcaacaatatctttgatacatactatgcggaacaatctagcgttcgttggggccacgctggtgattggtggccaggtcaaggtcgcaacttccgcttaggtattgaagttaccatctaattcatcgcataagtaaaaaaactgataaggctgtaagctataatgataaaactatagattttctcttgtaaaagcactataatagaatgtatctatatatatcaatgtatgcgtattacagccttatttttgtgtaaggcgtttatttagaggagttggattctgtatggaactaccggttttatccccgtatatgatggctcgcaagccgtcggggatccgcatggggcaaattaaatttttagagcgaaagaacccacctattttggttaatggttctattggtaatgttatgcgtcctatgcatcccgccatgcagcgccgactatttactctaggcggaccaaatagtcctttcagtacaggcatcgtgccatatgtaccaacaacgggtaccgatgaatgccgcgaagcattcttgcatattttgcgcagccaaggttttgatacaacaggccttaatgtactcgttacagatggtgcgtccatggcgatggaaatcatcatgcttggcgtttgtggcggtgcaggtgaagaggaacgtcctctattgatgttcaatccgtcctatacgaactacgatgcggtaggtcatcgcattggtcgtaaaacggtaaccgtagaacgacgcctgaacgagaatggcgaatttgaattgccatccattgaaaccgtggaaaaacgcattatagaaacaaaaccaggggcattgttgattattccttacgacaatccaactggtcagctattcagcaaggaaactttgattgaatatgcatctttgtgcgtaaaatataatttatggattatttccgatgaagcctatcgtgaattggcctacgaaaaaggcaaggaaacatctagtatttggacattgacgaataaggatgtaccaggtatcgaaggccgtcgtatcagtcttgaaacggcctctaaggtttggaatgcttgtggccttcgcattggcgctatcattacagacaatgcgttgtgctatgaaaaatctgttgctgaatatacggcgaatctcagtgctaatacgcttggtcaatatatttttggtgccttggctcatgaaagccacgctgatcttcataactggtatgagcaacaacgtgattactatcgcgaaatgatctttgaacttcacaagggatttaaagaggtagaaccagatttcattatttctaatccagaagcgtccatctatttcgttatcgatgtacgcaatgtagcaaaacctggctttgatggcgtagaatttgctgcttggtgtgctgaacacggccgtgtgaccttggatgatggcaatgactatacattgctcatggctccacttaacggattctacagtggtgtcgatagcgaacacaatcctggtaagacacaacttcgcgtatccttctgcgaaaacccagatcttttaaaactagcgcctgtattgctatctaaactatttagagcatacgaagcgcaacgataaataaaaatggatatggaattatatgctgaattaacagactctattgagtatgcattagacgaggctgattttgcagcaaaagaaagtaaagttagattctctggcaccgatgtttttcgtcgcgtaagggagagaatcgatggagcagaaaaataaatttaaaaggagctatattgctgaggataccctctagcagtatagctcctttattgttccctataaagcaatgatagggagttgtgtttaggtattatctttttcatagtctagtcccttagtagatatgcctatgctttgttgttgatttagcatagaactatcctctgttgatggataggatgtgtcgtctaaggttactgtttccaataatttgtcgatattatcggtttggatggatacttctttgttgtaccattcgccaaactcgcggataactgtttcattgcgcctataataggtgtattggtcaatttttcgcgattccacaaggcctgcacgctctaacatagtcataaatgtagatacagacgattgcgatacaccacagcgtttttggatactcttaacgctaacgctgtttggaaaatcgatgagagttttaaagtgtacttgaacaccgaattcttgctctgggtgctttagccacaatataatatctaaccgatgtggattggataatgctttcagaattctttgcggatccatatggcctccttgaggtaaataccaaaatgttgagtgccttactttgaccgtggtcttgcattatgcggtcgtattatatacgcgtcttgctccgtatagagaatattacttacatttatcatacgctaatttttatgggttggcaatgtgaactgccaaaatcttccaccggccgggtctgacttcgcccttcgggctacgcagggccaaagtcagcttttggcagtccccattgcctttccaaaaactttatgtgctagaagagaaaggcctgcgttggacgcaggccgtaaaggtagagtttagaagaatactcatagtgctttatttataaatctcattatatataaatagtaaatttatattaagaggattataattaaattgtatagttagttcgtgtttgtataaaatggagaagagggcgtatattgtgagctataagtctttaaatggtttaatgcgacatttacgaaatcaaggtattgatattagaggaacgacggataagcgactattaaggaatagtggatattttcatggatataaagggtataggttttttagacaacctactaaccgactggcgattcaaaattatcgtgaagttgaagctattattcgatacgatagtgagcttaagtcattgttatatagcaaattaatgtttatagaaactgccgttaaaaatattgtacttgaagaggttttaaattttatacaatctgagcatattaatgatatgtttattgaaaacattatgtgcacctaaaaaagaaatcttatcttttattaaacagtatgaaaaattagtagcagatgtaagacaaaatgttaatactagagtagaatatgcaattgttccagctaatttaagtgggcgtcttagtcagttgaaattggttatatctagttgattgtttttataagttgtattataataatgttaattgcggtatgtcttttcggagcatacttgatgggctggtctcgaccagcccattttttattttcttataaaattttcatgtatctatgctatgttaaaaaggtattttcaatctgtatcgtgaatatataatatatagacttatgtaagttaggctttcataaaaaggagctgagtatatggcaatagatcgaaatgagagatttgacgttatcgttgtgggggcagggccggcgggtgctgcagcggcgttacgtttggcggagcagcgtgtgaaggtgttggtcattgagcgcgggatggcgccaggtgctaagaatatgatgggtggtcgtatttatacgcactccctagagagattggtaccggattttagggatcgtgcgcctcttgaaagaaaggtgacgaaggaacgcatttccatcggcgctggcaatgagatgacgaccatcgaatatagttatcaagatgtgaaagaaaatgaagaatcctatgttgtgttgcgtgctaaattcgataaatggctggctgaagaggctgagaagaaaggggctttgctcgtttctaatgtacaggtaacggaactcatcaccgaaggggaaggtaaaaaacgtcgcgttgtaggtgtacgttgtcacgatgacgaggtgtatgcaaaactcgttatcatcgcagaaggtgctaatacagtgctcttagaagaggctggtttaactgacccgaccgatcctaagacgatggctgtgggtgtgaaagaggtatataaattcaaaaaagaggacctcgagaatcgccttatgttatctagtgatgaaggcatggcatggctcacgttgggcgatatgacagatggtctactaggcggcggctttatatatacgaacaaggacagcctttccgtaggcatggtagtaggccttgaggacatcggcttggcagataaatcagttgacgaaatgttggaggctttcaccagtcatccaagaattgcaccacttttgaaaaatggtcaattaaaggaacacagcgcgcatcttgtgcctgaaggcggttataaagcgatgccaaaattgggcggcaagggttacatcgtcattggtgatgcggcgcggatgtgtatgaatctggggtacacgattcgtggtatggaccttgctatcgagtccggcatgtgcgcagctgaggcggtcaatgtggcgctacgcgacgaaaatatggatcgcgttactaaattgtacgaaaaacaaatcaaggcgtcttggttgcgtcgcgatatgaaattgtataaaaatatgccgaaattcttggcctctaatccgcgtatttttaatgagtatcctgcatttgtaaacaatcttatgcgtgatgtattcaccgtaaatggtgacggtgcggtgccattgatgaaaaaattattgcgccgcgtcaaggatgtaggcctattcagattgattcgtgatgcatggaaaggggtgcgttccctatgaaattagaagagcgtttgggcgcgaataaatattatgtagatgaaacgtgtcctcacatcattattgatggtgaaagcgtaagccgcgaagaggcgatgaagctcgtgaatggttgtcctgcaggtttatacacattgcaagaggacggcacgcttgcttttgattttgcaggttgtctcgaatgtggcacatgtcgcgtattatgtggacacagtgttgttaagacttggaaatatcctcgtaacgccaagggcgtagagtttagacaggggtgagtgcatggaattattagtctgtataaaacaagtaccggatacgtcggaaattaaactagatccggaaacaaataatctcatccgcacaggtctgcctagtattgtaaacccttacgacatgcatgctcttgaggcggcattggttgtgaaagaccaaattgaaggcagccgtgtaacggttgtgaccatgggccctccacaagccgaagaggcgttgcgtcaatgcttggcgttaggcgctgatgattcggtgctcgtaacagatcgtgcctttggtggtgccgatacattggctacaagttataccattgcatccgctattcgtcatattcaacgaaccatgaaccgtcaattccaactcattttctgcggtaaacaagctatcgatggcgatacagcacaggtgggccctcaaatcgcagaggaactcggtatggcgcaagctacctatgcttgtgaattttctgtagaccaagcctctcaaaaggcgattgtaaagcgggagcacgagaacggttatgaagtgattgaagctccgttgccattgcttgtgacgacgacagccgaacttaacgagccacgtcaacctggcctttggagctccatttacgcgaaacgatatactattaatcatattactttgcgtgatatgcctcatattgatgaaagccgcattggccttaccggttccccaacacgggtacgaaaggtataccaaccaccgcttcgtggcaaggtagaaatgctttcatccgtcgacgaaggcgccaaaaaggtgcttgaattggcgtaccacatcaagcctgaaaagttcgcacaccttttggtgccaaatgacacaccggttgtagaggcgcaagacgatgagggcattgacgtaaatgaccccgtacagcgagctgcgtctgttgaaagcgtggtgcctagcgaacctaaggcggtagatccaaatacatttgcagcagaggccgctaaagctgatgctgtttccgaaggaggtgaccgataatgacaaattttgatgaatatagagacgtttttgtcgtagctgataccatcgatgacgtagtgcatccagttacgtatgaacttatcggtcaagcccgccgcatcgccaaggaactgggccagctcgtgcaagtcatgctcctcggtgaaaacgtacaagctgaggcggaggaacttgtggctcatggcgctgatattgttcatgtttttgaaagtcccctcttgaaatactatacaacagatggctatacaaaggtattgacggatttctttgaagaccataaaccgaatatccttttaattggtgctaccaacaatggccgtgacctagcaccgcgcatgtctggtcgcatgcaaaatggcgttgtagcagattgtactatcctaacggtagatacagaagaaggccttgtagaatggacccgtcctgctttaggtggcaatatcttggcggaaattatttcgccaaaccatcgtccacaaatgggctctgttcgtcctaatgtattcaaaaaacctgagcgcattgcggacagttggggccgtatccaacttgaacaatttgacctcaagtccgaagacattcgcaccaaacgactagattttattccattcagcaagtctggttataatatccaagaagcggatatcatcgtagctggcggtcgtggtatgggttcaaaggaaaactttgataaactctatgaactcgccgatgctatcggcggcgttgtaggtgctacacgtccactcgttgaaaaaggctggattgaattgccataccaagtaggccaaacaggtaaaaccgtaagccctaaactatatttggcatttggtatctctggcgcaatccaacacgtaagcggaatctctggtgccgatacaatcgtggccattaacaacgatccgaaggcggaaatcttccagcacgctaactatgggattgttggggattgtatggaagttctcaacgatatgttggcgcatttaaaatagaacataaaaagattgggcccttagcttaattgccgtagtagaaaggaccccttccaaaaaactccaccggccgggtctgactccggccggcggcctccgcagggccaaagtcgttttttgaaaggggttctttctcctctctacagtcaatacagccataggcccaatctttttatgtgtccattaaattggcgcctacacatttgttggtaggaaccgggccaaagtcgttttcagaaccctatcggttctttgccatctacattagtctatttttagcgccagcataatcgttggaaatccacagtgagggtaaagtcgtttttcgaaaggggttctttcttatctctacagtcaatacagccataggcccaatctttttatgtatccccttaaattagcaccgacatatttgttggaatgatatagatataaatatggtaaaatggtgttatacatatcatagttgaatggacgtagggaggtgatgttgtgactgctgatagtaatggttatgtaggttttgatttggcattgtttatcgctgagaagttgcgtgctcagtttgtgtttgatatggcacagatggaggggaacacggcaacgtatccgcaggttgagacgattgtgtgtggtacttctgtggcggggctcagtgtgagtgaaactcgacaaatagataatattaatcgtggctggcaagccttgatagaagatttgcgcttaaagcgctttcggattaataagttagtggctatcgaatataataagttggtttctgaaagtgagaaccgcctaggatttggtggttttcgcaatgcaccagtagctataggtggtacaagttatacaccacctactccgttagatttaaattcttgttgggatgatttaataactaggtgccaagcattagaggcgaattcattagaacaatcgcttctattatatgccgagatggctcgtaaccagttctttggagagggtaataaacgaactgctctgctcatgatgaatggcaacctaattcagaatggattgtgtccgattacgattacaaaatcgcacgaagtagaatatcggaccgctttaattggatattatgaaagccctgagcaacatcgcattcaattcttcgatttcctaaaacaagaacaacaaaccatgctaaaacgctggggctatgaaatccaagatgtaagtaaatccgcccctgtcatcactgttaaatagaaggaggaatacatatgaaccgcaaaattttcgttacaggtgctacttctggtattggccttgagtgtgcccgtgctttcgctcaagatggagataatgtattgattgctggtcgtcgtgcagactgcttggcggcgattaaggaagattttgagcaacaatatggcattcgtgtggatacgcttgtacttgatgtgagcaaacgtgaagatgtagatgctaaggtgaaagctgctattgaagcctttggtggtatcgatgtactggtgaacaatgcgggccttgcacaaggtcttgatccatttcaagatagttctgttgatgatgcagtaacaatgattaatacgaatgtattaggccttctttatgtgactaaggctgtattgccgttcatgatggctcaaaatagtggtcatattgtgaacatgggctctactgctgggatttatgcgtatccaggcggcgctgtgtactgtgctacaaaggcagctgtcaaaatgttggccgatggcattcgtatggataccatagctacagatattaaggttactaccattcaaccaggtatcgtagaaactccatttagtgaagttcgctttcacggagatgctgaaagagcagcttccgtttatgctggcattgaggctgttcaaccagaagacgtagccgatgtagtactatatgtaacaaaccaacctaaacgcttgcaaatctctgatgtaaccatcatggcgaaccaacaagcggcaggttttatggtacataagaaataataggctaaatactaagctttttaaaatgatataggcagtattcttgcttttggagattgttgttatgacaacaaagataaagacattactagtggcttctttagcatgtgtagctattggttcctatagtattactagtgctcacgagccatctgttggggatcgttctgtgcctatgactggtggaatctcagttgaaccaacggaaccaaattttattatgccgagtcctgtacatgtgttcaccacagttaaagaagcggcggagtatatgaatattacaccacagatgccaaagttgttacctgtaggctttaatattcaatctgtcattactattgataaagatattttacaggtcgtttatgtctacgaacccggtatagatccgtacgtaaataaggccggtggtgctcttattttttatcgtacatctactaaattaaaaggtgatatcagcgatgaccataaaattcataaggttatagaaactgaaagtgtagatggtacaaaggttattttcaaaggcggtaagaaaatggtttatcttgcatcgtggatgaaagatggacaaaatcactctttagaatttcagcgtcccgttacacgagatatggcgaaggctattatccgtaatattgttgaggaaaaatcacatataaaataaatgtgtttttaataatttttttattgaccgaagggagattatactcatggttaaaaaatttgtattaatggcagttgcgtgtgcttgtgtaggttcttacactgttgctggtgcgcaaggtacttttgatgtaaaaccagatccagctaaacctgtagttgcagaacaggcagcgcctatggttggtatgccaagcccaattcatgaattcgctactattaatgaagctgctaaatacatgaatattacacctcaattgcctaaggtattgcctataggctataatattgagtctgtaagcacaatcaataaagatgttttgcaagttgtgtatgtttaccaagctggtgaagatacaatgcggaaccaagcggcaggcaagcgtatcatttatcgcgtaggtactacaaaaggtgatatcagtggtaatcataaggattatcgcgttacagctacagaaaaggtaaacggtacaaaggttactttcaaaggtggcgaaaaaatggtatacctcattggttggacaaaagatggtcaaaaccatgcgatgtactttgaacgtcctgtcaatcgcgatatggcaaaagcgatcattgctaatactgtagcacctacagcacatacaaaataatataacttaaaaatgtatacataaaaacagctccttttatgaggagctgtttttcgtttatttatatacaataacgattggttattctcagagtataatttacaataatttttataatgggtagaaaaatacgcatatgatttggtattatatttatcaacagaatatacatgattataaaagttggaggtatatatggtaaataacataaaaacaatagtagatttagtggtaaaacgaattgatttagttaccaaatttatttctatcttatttatcatggccctttttacaaattatttgcatgactattattatctgaatatataagatctactaccattattaccagaagtaatacaattgctattacaaaagtttgagtttttcttgtattggattttgccatttctatatggtatcttgggaattttcttttgtttttggattgttagtggtattgttgaacgtgttacgtaccatttacaaaagacatattctgttaatttggggcgggaaaatacttttagtaactttttatttcatcaaagtttaggtttaatcataatagtgactatttttggtattttttatatgggaagtatatattatagtttaactactgttaatcatgtaggcacattaatttcaactgatgtttataactcagcattagatctgattaatccaatcaaaagacttctcggatttaatattttatttattgatgctacaaatacacataaggaatggattgagttatcggtagaaattaataaatatattgtgactggactatgtatatattgggcttttataagaccatatatgagtacatgctataagaagagctgctaatatgtttcttctaatcaactttcataatcttcgtagttttaaaatttaatagtagatagattcttgggccttctatgttacaatgatagtaatatagagggcttgttttagtttaatgtatgctaattttaagatttttgtatacagatattgaatgactatggatgtaatgacagagaggctttcagatgaataatattattatttataatactcaagatggaaaagctaaaattaatctaatattagataatggttctgtttggttgagtcagagtgaaatagcggaattatttcaaacaacaaaacaaaatattagtaaacatattaaagctatatttcaagattttgaattgtctgaagaaggaactgtcaactataagttgacagttcaaaatgaaggtactcggactgttgaaagaaagttagcttattataatcttgatatgattttagccataggatatcgtgttcgatcgccgcgaggaattcaattcagaaaatatgcatcaaccgtattaaaggattatttgataaaggggtttgctattgatgatgagcgactgaaagaattaggtggtggcagttattttaaagagttattagatcggattcgagatattcgctctagtgaaaaggttttttatcgtcaagtgctggacttattttctactgctgttgattataatccgatatccgtagaagcaaaatcattttttgctacagtacaaaataagatgcattttgctgttcatcataatacggctagtgaagttatttataaacgtgtagatagcaaaaaagagtttatgggattaactactttcaaaggagaattacctacattgaaagaggctcaaattgctaaaaattatcttacagaaaaagaattacaagggctcaatcaattagtttcaggatacttggattttgcggaaagacaggcccagcgtgaagtccctatgacaatggctgattggataaagcatatagatgcgattttgtcagctacaggcgaagctgtattacaagataagggacatatatctcatcaacaaatgcaagcgaaggtcctttctgaatatcaaaaataccagaatcaaactattagtcctgttgaacgagattatttacgggaaataagagttcttgatacatatgtaaaaaaaggtggtaaatagttttacttgtgaacgaggtatcttatggatctgaatggttttttcttattattcccgagcatttttatattgcacgaacttgaagagattcttctatttccacgattcatgcgaaggaatcctaaactgcaacaacaatttttagcagccacttttacacccttcagatttaatgccatcgtctgtcaggaattcatacttttgttggttatactgggattaagtatatattttgaaagcttcgatttttatattaccattatcatagcatacgtataccatgtaattggacatatattccaaagtatttttctgcgacagtatatcccgggtgtcctcagcggcattatcacagccggatattgcacatatcagatatatgatgcggtgtcggcaaactatatgcaattagcctattcgttcctaacacttttgattattttcgttaatatcgctgtgagctttaaaatgcttcaacggatacaacaaacgcctgagtagactgtaaaagtaaagtttttacagatgtactattaaataaagaggctccttaatgaggggcctttttatttaagtagattaagataaaattgttgatatcaataaattagtagtactgatagaggagtttatataaaagggtagaataataaataacataagttgaattgttgttagggagattatattgttaggaggatatataatggagcatatagatgagttcttgagcgtgttgacgattgcattagatacgctatattataaagatcagtatttaataaatcatgaatctatgcgacatactaaggatagtaaacatattagtgaattatctatctcacataagcttgggcattacttggccttacttattaccgaatatgatgtagattgtgaatataatcgaaataaagatgataaaaaaattatggaaaagagccatattagaccagatattattattcatgaacgtggaagcaatgagcataattttgctgttatagaaataaagccttggtggaatagtgacgataccttatatgatgaaaaaaagttagcatttttgactagtacagattgtgactttaaatataaatacggtttaagtttaattattaaggaaaatagagaagatactaaagtaaaaatatttattgatggtaaaatagataatgtttactaaaaaatataattattatgatgtagaaaatggctcctcatgtaaggagccatttaacatatctatatattaaattatgcaatttccgctttcaaatcaattatatttttagatgctacacatgcatcacagtcacagaattctgcgccttttgctttgatgtctttagcgtgttgtaataggttagctgcgccttctttgccaaggatttgtgtagcgagttcagagcctgcaaagccgattgtttcgtcgataagtgcaatattttgttctgctacggatacgagttgttttgtaagctcttcttgcttaggagtaccttcagcatcaatccaagactgagcgaactcttttactttagggttgctttgtggtgcatctaataatgcttgtacgagttgtgttaattgtgtatgtgtcatgattatttcctccatataattactaactatagttttggaatagtgcatttagtatcatatgagcacttgttccttttgttgagtccattatagcacctacaataattttgaatagtagaatgatttacgatagatactatcaaatgtgatagatttatgatgataactggtataaatttttgggggaatagaaaagaggaatgctttcacattcctcttaagcttagttagaataaatctgagtggatacccgtacgagttaaagataatactaactactgctaagcactaatctcaacataactgattactccaatcctaaatcctcaatcatttcttttacattagcatatgattttgcgtttatttttcctgctaatatatctttcgtttcttgaatagcagcttctgtttctggattataacgaggttgtttaggttgaaatggaaatccgccttccattagtgatgtgtggagaaaaatattaatcgcatcagttacggatatgccaaagctagcatatagtgcttctaattgtgcttttacagctggctcgatacgcaaactgatagaggccgttttagccatagtatcacctcctgttacttttattgtaatgcaattgctatataattgcaatcttataagtgcgaattgcaagcataatacatatcttttcctggacggaaaatacttataaatataagaatattagctttttaggtgatataatttacttgatatatatagtttgtttacaggggaatgtatcatgaaaaagattctatgtgcattagctacgctagcttttataggttccatcaatgttgtgtccgcagatgattcgactcgttttagactcaatggtaattcgatttatgatcaaccttatggtgatcgaaatgagtttccttgtccagatagacttggaagttgtactatgactgatgaggattatagaagcactcgtaaaggtcaatctctagaggtgtttgataccctatatgaggctaagcaacatttgaactttaaaccacagttgccaagtggtttagagggattacgtcccgtacatgtatccattgtggatcacgatgtattacaagtcgtgtatgcttatcatgagcttttaaaaggaacatattttgaccgtgtagatgatatgccaaagtatattaagtatcgcgtatcgacagtatcgggtaatatcgcaggtgactataaggattatgtacctcagaaaacagagattataaatggcatgaccgtgacttatcgaatggtggatgacgctgtttacttagcatcttgggaacatgcggggcagaaccatgtgtttttatttaatgagccagtttctgttgagcgggctagagaaatgattaacagtgtaggtactaattgagtttattactgtactatctttttaagcttgattagcttataatatacatataaagagagcccattaacgtgattagggcgttaggctcatctaaaactgaacaaaattatgatgacgcctaacgtgttagaggactgcactcctctatacgttaggcgtttatcgttgtactacttaactagtgcaatgatagtgactactgataacagaactatgataattacataggtaacttcatgatttgtcatagtatcacctcctcgcggagatgaacctaactcacgtcaacggactctcttcgtaataagtatagcaaaatactttttacacaaatagcgatatacagtcctctttgttgtggttgatattaaaaataatggagcttttatgaacgcagataattacaagatttcaacgttgccatatatagaaaatgctagcaatgagataatggaaaagtacaatataaaagcacaatatgaaacggaaccacctcatggagatgctatatattctatttctataaaggggaaagtattaccgttttggatttatggtagggacgttactttcataggtaatagtatggttatggtcgagtctgtaagatgcaaaacctgggatcccattgaaaccattattattgatttagagaatgaagtgtatgctagtttacaggaatggtatacagatatttcatttgttaataatcgaatagagttttccaatcaagtggtaaaaatggataaacgaattttaaataattttgagaatttagagtggataagcttttaagagtgattgcgtagaggatttattgactacactatagtgaagtgttattctatatatgacaagggatgtcaatatgtgacatagtctcatatgaacgaaaaaatagcagggtggcagccctgctatttttattgtgctagttactaacgagaatagggttataggacaaaacgtgttggttttataggcgatggagccagtaaattactggcttcaataaggttatatcttcttagaaaatcgtgttctaagtggagggaataatcatgctggtaagatgtataaattgtggattttcttgtcaaaattatgggaaaactaaagctggatcacaacgatggcattgtaagcagtgtaacatcacctttacacaaactattgataatactactaaatgttttcatcgatttctaaattggttatttagtaaagaaacacaacaggatatgcctgggcagggccgtacatttcgtagacagatagctgatttctggcaaatatggcctatgccgcccaaaattgaaacctcgagagatgtggtattcgttgatggtatttacttagctaaaaaagcttgtattgtattttgatctgttatgatggtgaatatgtattagggtggtatttatgtaggtcagaacagtctcgctcatggcaagctcttatgcagcgaatagcgacccccattgtggtcgtttctgatggtggacctggtcttagaaaagcattaaaaaaagtttggcgtaccgccaagcttcaacgttgtattgttcatgccgtatggcaagtacatcgttacactactaggcggcctaagacattagcaggcattatgttaaaagatttagcaagcgatttatataacgtaaaaacacaggaagatgcaaaaatatggattcaacgattatttaattggagggtgacttttaaagagtttctaagtgaaatgacacgtgatagtaatgataatttaagagctacgcatgaacgattactaaaagcctataactctctagtggtattaattaatacagagacaatgtttcgatatttagatgaaacattggtgttggataaagaatgtccgaggactaataacccttttatcgtctagttgccaacccattttcagatgagatattaataggtcgaggtattacctctagaattaatatattccctcgtgctatattacatatgagtagtatttttacgttcatatgtataaggagatactctatgtttaacttttatagtgagttattattacgtttacagaaacaatttgtatccgaacatgaatctgatttcaaatctattgaggatttgttagaagcatttatgactcaatataatcgtggtgattttaataatacgatagaaatgaaattacgtgatttatatgaggctgcagaagaggctgatacgaatgagaaatcaaggaagttatacaatgaaatccttgcattatgtcctgatgaagtagatgctaaacgagaactcatagcccttgagttacatccaagctttcaaatttatcagttgaaacagctagtagaatcgttgaaaaaaccaaagaaaatagattggaatataatagagacgcgtccttatatgcgttgcctcatcgacatggggatgatatatttagaatataatatgtataatgatgcgattgcctgctttacgccagtttttcacggagacaagcaagatcattcgggatttcttgtgtatatgatggttgcttgttgtggagctgccaactgggatcgcggccgcaaggtatatcagcgatatcttgcatgttgcgatgatatacaaaatgcatttaatcaggctccggatatcatgttgcctatgcatatgctgtatattctattggctttgcagtgtggtgaaagcaagatagcccatgatgtattagcagatcttgttgatgaatatgaagatattgattggttattacaagatgcaacgcgctggaacgattttgtagaagatcatttagaggctattatgtatatggtagaccaagtgagcaatatagattctgacccacgagaattaataagcttatatactgctatctcatttttaccaactcaattagtggattttgaaagtccattatggcagactctatatgatgcgtatgaacgtgttaccggtcgaactgttataaatcggtactctaatgatagttatatgggaaaacgcgagtccgctcatatgagccccgtagaggttgctaaaggtggggctttgcgtggaaatccggtatatgacaatatacggttcggtgcacaaattacactttcacaagccggcctatacacagtagatgattttaaaacaattactaaacaagaagtattgatgctaccgggcattggtaaaaaaacagtggaacaactagagcataatggtgttatatttaaagcctaagatgtgacttgaatttaatagcgatcctaggataacgaagggctatttgtctttttcataattaatataatccctttgatgagtatcttggtactgatcaaggggattttaaattactacagggttgtactaatttttgtcctataaccccattattacgctaatgttagagcgttgggctagttgctaaataaaagagctagaaaagcgtctaaccacttgcaaatgtagtaggcgaatacatttagcatgacggctagccaaaacaaataaaatagctgccacaaatacgaaatagacatcgtaatttatgacagctatttggcagtacatggtcaatcttatagtgtaattatttagttatattctattttttaaaagcctcaccgatggaataaattccgtcaaataagaaaccgaaggcgatgaaatagataaatgcttcaccaaaagcgatcggctcgaatataagtaataggcctaatagtaaaagaattagtgcaagccattttgcattacgtcccatgagtgataccatgctgtcggactttcttgatttaatgaaaataaagatggcttcaattaccatccagatgccgattgtgattgggagtactaatggtaggaatgcaaatccgccggatattaaatagataccgaatagagcattgataatgccgctgataagataccagccgctacgtaattcagacgataacgtaaaataatttataatagagctgaccgcactgacgaaaaagataatagaaaaaagccaggcaaaagctatgagattaataacgggatttaagagtaagaatatccccaggataatgcttacaatacccgataaaataaataagaatttacttgaaccactcataataattcctccaatcattggtactgcctatttacactatacgtgagatcatgggggctgtcaaattgtaacgataaaactgtgttttcacaaaactcacatgtccatcctgttgacacagttctatagaataccgtataatacctttatatcttaaatacgagctatgaatgggtataaaggtttacaaatcctgctttcagagagttgccggttggtgcgaggcaatagaggttgtacgctgacactctcccgtgagctttggtggcgaatacagcagtagtcatcgacggtggttccgttatacccgcaacgagtcccaattagggtggtaccgtgttatgtatataacgcccctttgagcaacgacagttgttctgaggggctttttttatactgtcaaatgttggtcggagcctccaccggccgggtctgacttcggcctacggccttcgcagggccaaagtcggctgcgaccgacatttaacagttcttattagctagagtaacggtcttcggcctagggcctcgacctactaaagtcgcttgcgagcacgcactttaattctacgttttgtttgattaaactttcacaatgaatagatataataaagtgttatgttttattagtacagaaaaggtgaagattatggatcaaaatcgcgtatatttcttcgatacaacccttcgtgatggggaacaaacaccaggtgtatctttacaaactcctgaaaaaattgaaattgcgaaaggcctagtacgcctcggcatcgatgtaatcgaggctggtttcccagcagcatcccctggggattttgaagcagtacaaacgattgcacgcgaagtgaaaggcgcaacaatttgtgcgttggctcgtgctaatgaaaaggacgtacaaaaagcgattgatgcattgaaagatgcggaacgtagccgtttacatgtattcattgctatttccgagcttcatatggaatataaattaaaaatgactcgccaagaggtattggataaggttaaatccgtattggcatatgcaaaaggtaaggttgatgaaatcgagttctctggtgaagatgcggcacgctctgatttagatttcgcatgccaagtatttggtgttgccattgctggtggtgcaacaattattaatgtaccagatacagtaggttacatgaaccctaatgagttcggtgataaaatccgctatattaaagaacatacaccaggcattgaaaatgcaattatctccgttcactgtcatgatgacttaggtcttgctaatgcaaatacgttagctgctattaaagcaggtgcacgccaagtagaaggcacaattaatggcctaggcgaacgggctggtaacgtagcgattgaagaagttgtaatggctcttaaaacacgccatgattacttcggtgaccttcaagtgaacattgatacaaaacaatttacgaaagtttctaaactagtaagtcgtttgacaggtgtcgtagttccaccaaacaaaccaatcgttggctctaatgcctttgctcatgagtctggtatccatcaacatggtatgatgagcaatcctgaaacatatgaaatcatgactcctgagtccgtaggggctgaaaaaacagacctcgtattgggcaaacactctggtcgtcatgcctttgccgatcatttggcaaaacttggtttccaatctttcacagaagagaaaatcaacgacctcttcgctaaattcaaagaattggcagaccgtaaaaaacaagtatacgatgatgacattatcgctcttgtagtagataacttacatcataaaaaagcattcgagcttgtggctcaatattacaaattgggtgaaaaaggctacgcatacgctgacgttcgcctcatgaccccagaaggtgaaaaagctgatgctgccgtaggtgacggtccagtagacgcatcccttaaagcggttgaacgtgtggttggcttgccaattagcttaaaagattaccaaatccgcgccatcacagcaggtaaagatgcccttggggaagcaacccttaaggtagaatataacggtcgcttgtaccatggtcgtggtattagcaccgatatcgttaaatcaagtgtaaatgcatatattaatgcagtaaactcagtattcctagctatggagctagaacaacaggaggaagaataatatgggtatgaccattactgaaaagaatatggctcgccacgcgggtcttgatgttgtaaaaccgggccaaatcatcgaatgtcatttggatgcggtattgatgaacgacatcacattcccaccagcgcgtaaagagttcttaaaaatcggcaaacctgtatttgaccgtcataaaatctacttggtgcctgaccatttcacaccaaacaaagatattcaatctgctacacaagcgaaagtcatgcgcgacttcgtacgcgaacatggcattacaaactactttgaagtaggtagaatgggtatcgagcacgttattttgccagaaaaaggtcttatcggccctggggaaatgatgatcggtgctgactcccatacttgtacatatggtgcggtaaatgcattctccacaggtgtaggctccactgatgcgggcgttgctatggcagaaggcaaaacttggttcaaagtacctgaaacaatcaaggttgagcttatcggtaaacctaacaaatgggtaactggtaaggacgtaatccttgacctaatcggcaaaatcggcgtagatggtgctcgttacatggcccttgaattcgctggtgaaggcgtacaacacatgactatggctgaccgccttacaatctgtaacatggctatcgaagcgggtggtaaatgtggcgtattcccatatgataaaattactgaagcatacattaaaggccgcgtaaatcgtcctgtagaaccaattaatccagaccctgatgcagtatatgctcaaactgtgactatcgatttatccaaattgcaaccagttgtagcattccctcatttgccatccaacacacattacatcaacgagatcgacaaagatattaaaatcgaccaagttatcatcggttcctgtacaaatggccgttacgaagacttggtggcagctgcagaaatcttcaaaggtcgcaaagtagctccgttcattcgttgtatcgtaattcctggttcccaagatgtatacgatcaagctatgaaagatggtttattggacatcttcattcaagctgactgcgcagtgtccacgccaacatgtggtccttgcctaggtggttacatgggtatcatggctgaaggggaacgcacagtttccacaacaaaccgtaacttccgtggtcgtatgggtcacgttgattctgaagtatatttggcaagcccttatgtggcggcagcgagtgctgtattaggccgcattgcaggccctgaggaggtttaatatggattttgaaagcaaaaaaatctggcgctacggcgacgatgtagatacagacgtaatcattccggctcgttacttggcgattgctgattggaacgaactggctgaacatgcgatggaagatattgatactactttcgctcctaatgtgaaagctggcgaaatcatggtagctggtaaaaactttggctgtggttcctctcgtgaacacgcaccaggcgttatcaaagcaaaaggcgtgcctgttatcattgcacactcctttgctcgtatcttcttccgtaatgctatcaacattggtttaccagtagttgaaatcggcgaacaagtagaccgtatcgatgctggcgatgcaatcggcgtagatttgtctaaaggtatcgtatacaacttgactaaaaacgaacaataccaaggcactgaattgccacaattcattcaagacattgcggcagcaggtggtcttgtgaactttgcgaaacatcgcaagtagtacatatccgggatggaatgtttgtttttccctccagttgccttagcggtcttcacccgaggggttcgacctagcaaagtcggttaaaacaaagcattccatccctacactctacaactttgcggtatttcgcaaagttgcaatcccttgttctgagggtgggtgtgttttttcggtcttgcggagttccgcaatgtattgatgatgtagaggcaaggtgaaggcctcaagcgactttagtaggttgagccccttgggcgaaggccgttaagctagctggagctttagggctttaccttgcctcggatgaatgtagtatatgaggaaataagaatgagcgaaaaaaatatcgtattgatccctggtgatggtattggtactgagattattgctgcagcgaaggctgtgtgtgatgtggcttttgagaaagctaatgtaaaggttaattggattgataaaaaagcgggcggtgcgtctattgatgcatatggtgtgcctttgactgaggatacgattgaggcttgtaaagttgcggatgctgtattgcttggtgctgtaggcggtcctaaatgggataatgtggatcctgctatccgtcctgagaaagcaatcctcggtcttcgtaaggagcttggtttgttctgtaacttgcgtcctgtaaaaatctatccatccttgcaagagtattctcctcttaaaaaggaactcgtacaagatgtagatttcgttatcgttcgtgagttaactggcggtatttacttcggtgaacgcgaagaggcacaaggtgaaggcgctaacgagtttgcttgggataaagaaacatacagccgttacgaagtagagcgcatcatggacatcgctatggaaacagctcgcaaacgtaataaaaaggttgtatctgtagataaagcaaatgtattggcttcttctcgtttgtggcgtaaaatcgctcaagagaaagcggcagctaatccagatatcgcaacagattacttctatgtagataacacagcgatgcaacttgttgtaaatcctgcacaattcgacgttatcgttacaacaaacttgttcggcgatatcttgtctgacgaaggtgctgttatttctggttctatcgggcttttaccatctgcatctatgggtactggcacagcattgtacgagccaatccacggttctgcaccagatattatgggccaaaacttggcgaacccattgggtacaatcttgtccgcagctatgatgtgccgtcactctcttgatttgcctcaagtggctgacgctattgaaaaagctgttgaacaagtactccttgatggttaccgtacaggcgatatctatcgcgaaggtttgaaacgtgtgggtacgacagaaatggcacaagctgttattgaacgtttgtagtcatgtaagctcgtgcatcttgactagttctctgatttttgtcatatagtcagatgcatgatcctatatcatgtgcggtaaaagaacgcttacgacattgcatcgcatttggtgaggtatttttagtttgtatttagtatagttttagaatgaggtgtttaccatgaaatcaactatttacagaaatctcactattactgcgttattaatggctttagcaattatgatccctatcgtaatgccattgaaagtcgtcataccaccggcgtcttatacactgtccagtcatgtgccaatctttttggctatgtttttatcacgtaaatcggcggcttgtgtagttattggatccacgttaggattctttgtagcaggattccctcttgttattgttatgcgtgcagcatcacatatcttttttgcgttgcttggtgcgtggtatcttaaaaatcacatggaagtattatcaaatgctttttcttttgtgacttttaactttgtgtgcgctatcattcatgctattggtgaagttgttgcatgtttactattctatacaactactacattaccgaatatcgacttaatgtacgttgtatttgtcctcgttggaggtggcactattgtgcatagtatggttgatggatatatttccttgtatatttacaaggccatacctaaatccatcattgaataaatgatagtaacctaatatggaatgaaatagggggtgaccattggtcacccccttaatctatctttttagtgattataattgttataatagatttgtagaatattgaggcagaacattttataactaattctagtaatggaggtgaagatagtggctacatcaagcttttttaaacccttagttgtgcggcaacaagatgaagcagcatgggttaaagcctttgatacgacagagaaaattaagcgaaataaaaattatacaatcaataagttgaataaagaagctggccgtaaagtgttagagcaagtcgtgaggaatagttgctgatttaatttgtatatgtatcaaacacaaaatctataattgtccgaatggtttcattagcccctataatcttgatttgtttgtatgatttgagacctagaattttaattggatctgccaataaagcggttaagaagctgtgtgtagctgttatagcgtgagagaaatcaaggactatggtttctcctttttgtatagccggaataatttttcgttctctaagattaatggcctctaatttgacttcacatcgttctccacaatagttgtacatatcaatatacaattcgggagcgcggactatattatttcgtttagctacagtttccgtagcgtgttttctgaaatcctctaggtgtttatgaaggtcatatgtttttagcctatcaaaaccaatggtcatgtatataaatgtgccgggccaagagttgtttagcgttgtgtatgttacatctagtggagaaatatgtgcgacaccatcgcccgatacgatatacatatctgcttctaatgttttgccaagattactagataagtaaaggcccatgccagcattattttgctgtttataaggtcctacgttgacgccaaatgtaccagagatttcaggctctagtgccatagcgatggcatctgcattgtttgtgaaaggcgcataggtttgctctaaatgtgttttaatacctacaccaagatcagcaagaataaatgatagttggtttttatctcgataccagttaaattgtaataatgatggaatctgaggattaaaaccgtgttctaatgcattatatgttagttcggatatgatataacgaactgcatcctcatatcctctaattaaatctgtaggtaagtccatagcgtaatcacgaattgtatttagcatttgcgtaatattatgatctttgtatttgatggcgaagagtggtttgttgtagacgtagtgaaagttatttttggaattatttagaatagagaggtagtttggaccatctaaacgattccacataatatctagtgtggaatgtttaggaaattggatggaaataaatgttttttgttgttttagcttccataaatataagattagtaatgtgagtgtttgatagcttgcatgtttacattgggttccatcaataataattttggtatttgaataattccatttaaataaagatagaattgaatcaaattcggtaataccattttgaataaatgagaatgcttttggtagggggatgataggggttccttgttttgtgcgtagtgtgttagtcatgtttctctctcctttaattgacaatgattaatcactattgctatactaatcgtatagaataacactaaggggggccttgatagagcgaaatgtttgccccacagttattatgaaacatcatgtttcatgccccatactttgtatggggttttcttatatctatattatagaactaatgtttgtaaaaacaagagaaatataactattatgatttattgatacatatctactattatttcatgatttttgcagttttatcataccgttccgaagtagtttcattcttctgtatgtccagctatttcctcatcttgaattggatgtattaattttatacaatatttgtaatattaatttatgggaatgtagagcatttaggagagatagatgagtggtcagaactggtggcgccgcataggtttagttatgtgtattgcagcgagtgtaggcattgtaagtggctgtgagtttaatatggataatttaaggaatagcagtcaggtgaaagctatgcaaagcgatagtgagaaggaaatctggcgtgtttttaaattttatttagctgctacaaatgagtttaattttactagtgtaaaatatagccatcaacatatggaaacggtgcagcaagcacgacaaaatataccgttagctgagtttaaagagcgggattacgaacgtcttgagcaagaactcatcgctgcgcgagaagcggggcatacacatagtgacttggaagccgctacggatgctttattaccggtattgcacgacattgtggtagctgtaaaagagttagatacgtattataaagaaaagcgctatgaatcagataattatgcatttgctcacacgcagttggagaaactttcatcattaatggatgtatttgaaccaaaatacgatgcgttagataccattgttaagacctatcacaagcaggagggagaacgtcttgttaagctgatgcgcaacaatgggcagacgaatggcgctaatatgacggaaatgacgcttatctatagtggtatagtagatcatattgtagagcataaatcggatagtgatttccagtgggtgaaagcacagaaagaagtagccgatggaattggggcaaagattactgctgccgaggctcagaatcgtttagagcaaaagaaacatcttgataaagcgattgaggattttattgctgatcctcgtagtgaaacggaagaagccgtggttgagcaatataatgaaatggtaagtagtccaatgaattttgcattattagattctgtgcagaagccgtatgtaccgcaagagttataatgtgaaatggtatatgttaaacatgatataaatttcgggtagaatatatttgacaacctacccttatgagccctataattatctattatatgaatattgcgttgaaaaagacggcatgtctcagacggatttagtagagaccaaactcatgggctgaaaggtttggaaatctagagatttgcggatcactttggagcaagcaggaaccctgccggtgaacaccgttatatgtctaagtggctttcacaaattgaagcctaggtatttcgtatgctcggaatattctagctttcacagaaggtcagtagggtggtaccacggatattacgtccgtcccttcggggacgggcgatttttttatgtaaaaggagcacatcatggattacggtaagacgttacatttgcctgaaacagaattcccaatgcgcggcaatttgcctaagcgcgaaccagaaattttaaagttctgggaagacaacaaaatttatcaaaaacgtttggaattgcgtaaagacgcaaaacctttcatcttgcatgatggccctccatacgcaaatggtaaattgcacatcggtcatgccctcaacaaaacgttgaaggacatcatcatgaaatacaaaacaatgactggtcattatactcgctacatccctggttgggatacacatggtttgccaatcgagcatgcggttattaaaaacactggtcttaaccgtcatgaaatggcgccattagacttgcgcaataaatgtaaggaatatgcattggaatgcgtagaaaaccaaaaacaagacttcattcgctttggtgtattaggcgaatgggaacgcccttatttgacattgcgccctgagtttgaagttaaacaacttggtatcttcggcgaaatggcaaaacgcggccacatctataaaggccttaaaactgtatactggtgtactcactgcgaaactgcattggcagaggcagaaatcgaatacgctgagaaaaaatctttctccatctacgtaaaattcccttacgtatccgagaaaaaggtaacattgccagctggtgtagatccaaaacacgcatactccgttatttggacaactactccttggacaatgcctgccaacgtagcaatctctgttaacccagagcttgaatatggttgggtaaaagtaggagacgaatactacttgatggctactgaactcgttgatgcggctatgaaagatatcggtatcgaagactacgaaatcgtaaatcgcttctctggtgcagatttagaattggctgaattcaaacatccatttgttgaacgtaatgctacagtattgtgtggtgaccatgtaacactcgaagcaggtactggttgcgtacatacagctcctgcacacggtgaagatgactttaacatcgttatgcgttataacaaggaaggcaaaactgaacttcctatcgtatctcttgttaatgaaactggtaactacactaaacaagtggacgacaaccgttatggtgatactgaattcccattggctggtgtagaaatccacgatgcagaagtgcctgtcatcaaaatcttggcgcacaacaatgcattgcttcacaaatctagcttgcgtcaccaatacgctcactgctggcgttgtaaaaaccctgtcatctaccgtgctacagaacaatggttctcctctgtagatggatatcgtcaacaagcacttgatgcaatcgacaatcaagtacaatggattcctaaatggggccatgaccgcatctttaacatggttcgcgatcgtggtgactgggtaatttcccgtcaacgtatttggggcgtgccgattcctatttactattgtgaaagctgcggcgagcacatcatcaacgatgatactatcaaagcattacaagaaaaagtagccgtagaaggctccgatgcttggtgggctcacagtgcaaaagaattgttaccagaaggtttcaaatgtcctcattgcggtcatgatgagttcaaaaaagaaacagacatcatggacgtatggtttgactctggttcctcttggtctggcgtacttgaagttaatggcttagatgtaccatgtgctatgtaccttgaaggttccgaccaacatcgcggttggttcaactcttccttgttaactgcagtggcaacaactggtaaagcaccatataattccgtattgactcacggcttcgttgtggatggcgaaggtcgcaaaatgtctaaatctgtaggtaatacagtagctccaagcgacattatcgacgtatacggcgctgacgttatgcgtttgtgggtatcctctgcggattaccaagcagacgtacgtttgtccaaagacatcgtaaaacaattgtccgaagtatatcgtaagatccgtaacacattccgcttcttgcttggtaatttggatgacttcaatccaaacactgataaagtggcttacgcagatatgtccgaatttgataaatgggcattgttgcgcttagaagaagtacgtcaaaaggttactgacgcatacgaaaactatgaattccacatgttataccatgcaattcataacttctgcacagtagacttgagctccatctaccttgatgtaatgaaagatactatgtatgctgaaagcaaaaacaacgtagctcgtcgttctgctcaaacagcaatgtacgaaatcttgaaaacattggtagctatggtatctcctgtactttccttcacagcagaagaagtttggaagtacatgcctaaagaagacggcatgcctgaatccgttatgcttcaagattggccacaaggctatcctgaacacttcaaccaagaattggctgataaatggagccaattgttagacttgcgtacatctgtacaaaaagcattggaacttgctcgtcaaaacaaaacaatcggtcacccactagatgcatccgttacagtatatgctgaaggcgctgcattcgacgcattgaacgctcttggtgaagaaggcttagctaaactcgttattgtatctgaagctcacatcgtaaacggtgctgcgccagcagaggctgtaaaagacgaagaaacaggcgtagcgacagtagttgctccatctgaacttgaaaaatgtgaacgctgctggatccaccgtgatacagtaggtcaagacagcgaacaccctacactatgccatcgttgtgcagaagtagtgaaagcactataattccacaatcgatttaaatacagttgtcaaaatatccccttcagaaggctccatcggccgggtctgttccttcggaacagggccaaaagtcgccttctaaaggggatatttttctgtatttcagtcaatctgtgggattatagtactaggaaaggagagacagtcgcttctcgaaggggatatttttattagtccaaaactacgttctctattatagaacctttcatggggaaggccaaaagtcgccttctaaaggggatatttttctgtatttcactcaatctgtgggattatagtgcttttctggtgtttttgttatgtgatacaatgatgaaaaggctttagcatgattaaggaggtgggttgtatgaaatatatgttaatgcacaaggatgtagaagtattggaattttctttttctgagcaacgtcgttgggctcgcattgttgatgtattgaatgcggctcatgtacctgttaatatgcttgtgcagcctcataacagagaacgtgctttaaatgaatttattgaccatcgatttattccgcaaagtcgttctaattacgatgttattaaggccttgtataaggcaaaagatgcgtttgaattgtccatgcgatcgtatatggtgagtatttctgaccattattgggttaaaccttgtgatagttctgtgacttggtctgatgtgaatttttatgataatccaattcccgatgatcaagtattaataggcgctattgatacattacatcaatatgatccgtggcgtcggacgccgaatacatcgaataatgggacattacgtcaaatttggttgcaccgtggggatgagattttactttcaaaagcgggagaattgacctttaaacaggaaccattcaatgaggccgttgttagcgatatattagcctattttgatgtgccttatataacgtattatttggattatatgtcggatgaagctgagaatgtatcggtctgcgactgttttacgaatcgtaatgtagaatacattcctgcatggcaattgacgactaacataaaaccaaatgatgtgagtgaatacgcgcattatgtgaatcagttgcattcatttggtcttactgacgtgacgagtcagttagagcaaatgattgtgcttgatgcgctcattgctaatgaagatcgtcattggggcaattttggggctcttcgtaatagtgaaagcctagaattcatcgggcttgctcctgtttttgataacggaaactccttggggtataaagcggcatctgttaggcgcaaccgtaatgctgatgtgtccgtagcctttaacaagactcatacgctggaattgaaacatgtgtcctctgctgtgaaagtagattgggatggcattataaaccattgtatggagattgtagaacatagatataatcaaatggtagaaccagagtttggtatggatcgtgcacatatgattggccaattcatacaagaacgagcaaaaaaattaaaaactttttagatttatgaattcattgtatgctaccattctcctcaaatatatgatgataattgttatcgtcctattttcctcatgaaaaccttatgtgtaaaaatctactcatttcattttagaattaaaatgttcgtttatgatatttatagttagtttagtaagtgagtgtatgagaaggaggaatatgcaatggtagtaacaatcattaaagctgttatggctgctcttactggtttggtaaacgcattattgcctttatttaaataataaagttcccaaaaccctcataaaccctcaaagcttgagtatatatactcagctttgagggttttttctttatgtatatttttacttacaatagaatgaaataatatgcagatttgagatttaaacgatatttattgttggtttaaatgtaggctctttcgttgactatatctaaatatatacatataataaaaatgaaataaagatgaatatacatcttagaactacatatagagggagaatgagagacatgaaaagaatattagttgtaaaagctatggttcttggagccatagcttgttctattagtgctattggatttgcagcgggtgtagagtctacacatatacaagatgcaaccaatctgcaacaaaataaacaaggtacggaacaacatgaggcagtgcaatccaattggatggaccgcacagatattaaggttggcacacagtctaaagtgggtacacaagtgtctatagaaacattgcaaccattaactcattatgatgagaactccaagtccgtattgtttgtacaaggcggtattggtcgaggtggccaagagcattctgttagttactatcacggatatcatgagatttggtatccttataaccctgcaacgggtaaaggtgaccaacgatatatggcagaaaaatatgaacatacgaaatcattaggtacggtagcgaatgtaggtttagggtatcgccatcttagtaagaatgagcatgcctatgttggtgttaatgccttcgttgatcgagctttctccgagaatgctaatcgtgtaagtgggggactagaatatgtatcgggtcttaacgaagttcgtgctaatgtatatagaggtttagggagtgtgaaatcgcaatctgatatgatacatttaccgccatcgtacttcacatttaatttggctgggggccctgcttactatatgccacatacatctcaaaaggtattatctggatatgatgtaagttatgctcgtacatttaaaaatgctcgttgggcccgtgtacatgcgacggtatatcattggaatggtcttagtgtgcctaatcatagcaatgcattattgaaaacgcttgaaattggcaacagtcatggatggaaagtaggaactacattacaagtaacgcctcatgtatcgctagatgtaggctatacatcggatagcaaagatactagtggtgtctatggatttgttaaatatacattgggtacctctaagtttgcttggcatggtggtaaacatagtgatgatgctattacaaatgctcgcgctagaatgttagataaggtagagcgtagtccgttaacaataggccatacatatgaagaagattggaatgtaagacctaatgatcacttataaaattgatgataatttataaaactaaaaggggagacatttaataatgaaacataagttagtattaacatctatggtcttgggggccatggcgtgtagcataagtatcgtagtgggagcggccaatgtggcgccacaagtgagcgatacagcaaagcatgaggcagtgcaatctaattggatggaccgcacggatattgctgtaggtgtatagactggagggcaatctaaattagataaaggtcattttttaacggatgaccaaaattcaatctataataagcagtctgattatggtaatttaacgaaagcctatatagaaacattgcagcctatttctcattatgatgagaacagtaaaagtgttctgtttgtacaggggcgcattggacgtggcggtgagaaaatagcttctaaagagatgaggggttattttattaatgaacctataatacttaggaatgggcagctatctaattacaccataaaaaatacggatgaaaaatcatcagaaatattagggattattggtactgttggtattggatatcgacgtcttagccgcaatgaacatgcatatgtaggtgttaatgcattcgttgatcgagctttctcggacaattacaatcgtattagcggcggcgtagagtatgtaaacggactcaacgaggtatatgctaatgtgtacagggggcttggggataaggaccttgtaaaaggtggtggtaatccatatccaaaacgcttgtatcctaatggctatccatcaacattcccttatgatacgatttctagtgaaaattattatacctacaaaggcggtagagcactaggtggctatgaaatcggttttgctagatcctttaagaacgctcgttgggctcgtgcttatgtaaatggatatcgctggaaggggcaaggttttggccatgaacaatattataatccggggcgcccaggccattggtccgtaccatggttttcagtgagggatgcaaatcactataaggggattaaaatcggtgctgaattacagttaacaccacatatatccttagatattgggtataataatgctaacaatatgtcgaaggggatgtatggtactgtgaaatatacattaggtacatctaaatttgccttctggggtggcaagcatagtgatgatacgattactacagctcgatctaaaatgctagataaggtacgtcgtcaagacatgattgaagaatcctttgatgacattgaatacggttatttagcacctattaatcatctataatatggagaaaatgttagttttatcattgttatgagaggggactatatataatgtcaggtaaattattattgaaagctatggttttgggtactatggctttcagtatatctacaataggaatggctgcagaggttcaagaggccaatggtttgaattctgcacaacaaacaattgcatccgatacagctaggaaagaggctgttcgttctagctggatggaccgtacagatgtggtagtcggcgttggtatgaaagattcgaaagagacgcatagtcagcaccattatgttggtgaatcatcgaatagacatgatgatctacatactgtaacttcgaaaagtttaaaatctactgaaatcaataaattgtatattgagaccttgcaacctataacccattatgatgaaaatgctaaaagcgttgtctttgtacaaggtcgtattgggcgcagtggagaaaaaatttcatcttataaattagatagttatttggagccagccagacctgcagggacgtttataacacatgataagcaaacagataagaaagaatcattaggaatgaatgctaatattggcattggctatcgtcgtcttagtaaaggtgaacatgcttatgttggtgttaatgcgttctatgaccatgtatttaaaggtggttataagcgcgttagtggcggtgtagaatatgtggcaggccttaatgaatttcatgctaatctgtaccgaaatctggggactgatgatagaaaatatataggactacgtggacgtagtgttgtattgggtgatcctacaggattgtatccatatgggatggattctgatcaaagtctttataattatggtatagctgcttatgaaaatcattggatgctattagaaaaggttgctgctagtgggtttgatgtagggtactcacggaccttcaaaaatgctcgctgggctcgtatccatgcggactattataattggcgtggtagagaggctgtaagagtagggtataaaaaattaaaaaaacgtgatgccataaaaggttttaaagtgggtgcagaattccatatcacaccgcatcttactcttgatgcgggttaccaaacggcatctcatcatttgagtggtccttatgcgaccttgaaatataccatcggtacatccaagtttgcttggcgtggtggtaaacatagtgaaagcgcgattacaacggctcgttccaagatgcttgataaggtacatcgtagcgacatggttgtacaagaaactgtggaaaatacttatgaacagcagtttgtcgatgttggtttaccttgatgcgggttaccaaacggcatctcatcatttgagcggtccttatgcgaccttgaaatataccatcggtacatccaagtttgcttggcgtggtggtaaacatagtgaaaacgcgattacaactgctcgttctaaaatgcttgataaggtagaacgtcaagatatacaggcactcaatctaaatggggatttccgagttcattaccctcatgatcatttataatatatgtagcctgttttaggttataacaaaggagctagtacgctgtgtactagctcctttttgtatgtattcttgctattgcaaatccttaggcacgctgagcggtttccagttatctagctcaggaatgtccaaggtcgtaatggttcgttgtatccagtagttcaaggatacttcgttgccaaagtattgttcaaataggtatgtattacctgggatgtccttttgcttaccatgttcgtcaacgatgtggcgcatcgattccttgaggtatagttgcactctaaatggggtagaccgcttgcctttaaatatgaaataggatggcccaatgaaatcgtgagtacgaacgttgatttgctcgtagcgattgctcttgaggccctccaaggatgcttgtatcatggcgttggcatcgtcatattcttcgagtaagaatggctcttgatcgacgtcgagcacatagtgccatgtcggtttttcctcgtctgtttcgatggtccatgcatctgaaagctccggtaaacggtggctttcatatagatcatgccacaaattgtgggtgccctctgcattgagcagcgatttatagataatctcatgcccttcagctgggtcgtagccgtagaaccgcacctgataggtgttgtgtggcatacgtttagtctccagtttatagatattccgcaatttgtctggaatggttaggaaatgattgtaaaagctaagcacaaccgtatcttgtgtggaaagagccttgtcgatggtttctcggtcatataatgtggtatcccactgaaagccattcatagtaacggataatcgggctgcattgtgaggccatgtggtaggggccgggcgcacggtcgtagaggattcggttataccttccttgtaatgccaatggccatctaccttttcgaaagctgctaatcgttctgctgcttcatcatctaccggaatatctttgatttcttcgctgcgattggcgagatgtgacacgatgtactgatgcgagctttcataataatgaacggcactgtcgaggtcaggtgttcccatcacataacctttttcataggcgtagcccaaggcaacgcgtgtgagcgcacgggtgatgtcgtagaagagaacgcggtcctcctcttgtaaggcacgattttcctcttccaagacgcgcatcaaggactgcaccgcaaatttgatgttcttggtcacaccgatgccgtgaatgcgcatatagctaatatacggcaatgcaaataagaatctatccttagtagccgccatatgtgtcaaatcggcgataagcccccagtcgagggggagatgtccaatgtgaaagatatagctaaatgcggcctgcaaggcggcatagcctgcatcgttaaaattctttgttgctgcctgttggtacaattccgtggccttaactggatcatagggaatcgtagcacggagcataggctgttcataaaaatggtagtaatagtccgcaagttctgcgatacattctggttggcctaggtcagcaccctttgtaaaccatgtgaaagcctttgtaaactcgcctctttcgtgatggtcgagagccgtatagagcatcatggtcggattgcctagttcagcggccctgcgtgccacacggcgtgcattttcataatcgccttcatcgatataaatattgcgcaagttcccttggaacatggcgagtccttgatcaagggctttggtaaaccagtatttcgcatgctcccgagattttgcttgtagcgtttcttcgtctaccataccgcgcaaggtagcaatgacttcacgtaaactcttgctgcgcgttgcttggtgtaatcgttgactaaagctagccttttctggacctaataattgcttagcctcgttaataacgtggtaatcgccccaaaagaatacattacctataatatattggcagtatgcatcatcctgctttgcataatcatagatgatgcggaatgcgtcgtcaaaggacaactgcatatctcgcctcaccgtaggcgtaatcgacccggctatgcgcaatgcttgtaatgtgccaattgaactattccggcggatactatcatgcaaacactgatacgtgcgcatattatcctctggaaaacccgactcggcccacgtaaagcgaggccctgcatagacacgtgccaatagggcatatgcatcacccaattcacgctcttctggagataaagccttctggtagacttcctcagcatccgattcgtccgtactaccttgtgatgtagccgtgttgcgcaactcatgctgaattggctttgtcacattcgattgattatttacaatcgactctaaaatgcgcagaccctcttgagcggactgcggatcataagacataaaaattaagtggaagacccgttggaggcggtctgtgaaatattgagccataggccctcctttcgtttttatacaatacactactattatataccgcggtagaaaatggtagaagaggaaaagaaccgatgggccccaaaatcctccaccggccgggtctgattcgcccttcgggctcacagggccaaagtcggatttttgggcccatcggttctatctctcaatccatagccgacacgcggtatataatagtagtgaaattgataaaatccgttattgccaacccctccgatagaaaggagggcctacggcctgtgcggagcccgaagtcgttttcagaggcaccatcaccttcaactatctcgttctagtgttgattcggtatataatagtagtgaaattgataaaacccgttattgccaacccaaccgatagaaaggagggcctatggcctgtgtgacgacgtatcctgagaatctccaccgaccgggtctgattcgcccttcgggctcacagggctaaagtcggatttttgggcccatcggttctatctctcggtccatagctgacacgcggaatataatagtagtgaaattgataaaatccgttattgcccacccagccgataggaaggagggcctacggcctgtgcggagcccgaagtcgttttcagaggcaccatcaccttcaactatctcgttctatgttaattcggtatataatagtagtgaaattgataaaatctgttattgcctacccaaccgatagaaaggagggcctacggcctgtgcggagcccgaagtcgttttcagaggcaccatcaccttcaactatctcgttctatgttaattcggtatataatagtagtgaaattgataaaatccgttattgccaacccagccgataggaaagaggggttacggcccgtgtgacgacgtgtcctgagaacctccaccggccgggtctgactacgccctgcaggctcacagggacataagtagggtgtgaggaaacagaggagcatggcgacgcatggggcccacacatcacttagtcacgaacgtaagatttcgtaaaacgaaatccacagtgagtgtaaagtcggtttcagaacacgccaccgccccacgcattaaggctagtgtcaattcggtatataatagtagtgaaattgataaaatccgttattgccaacccaaccgatagaaaggagggcctacggcctccgcgtagcgcagtattctcttgtctgtataacaaagaaataattttctaggcagaaatataatatatatgaaaaaagacaccccgtgaaaaaacgactttggccctgccccgaaggggacagacccggccggtggagttttttcgcggggtgtcttttgattatcgttctagctgctgaccagaaattattttttgttatagtcaccaaaccatttatcgtaaattttttggtatgtgccatcttctttaagttctttaagtgctttgttaacagcgtcttgcaattctttgttgccttttttcacacccaaaactatacctggggctttagtaggttcgcctacgagtttaaggtctttgtcagcaccttgttttaggtagtacatagcaactgcgttgtcgatgattgcgccatcgattgtaccagctttcaattccataaagatattggcattggagtccatttcttttactgttgtgttaggaatttttttagccatgtctgcaggaacagtaccgatttgaacgcctacagttttaccagcaagttcgtccatgttgtggatagaagtgttgtctttgcgaaccactgtgatgaaaccgccttggtcaaagtatacatcagagaagtctaatgctttttcacgttcaggagttgcgttgatgcctgctgcgatcatgtcgatgtcgccagattgaactgctggaatcaaagcgtcaaagcccatggatttgaattccatttttaggcctaattttttagcgattgcttcggacaaatcaacgtcgaaaccaacgtatttatcgccttcagtgaattcaaatggtgggaatgtagtttcagaacctacacgtaacacaccagcctcttgtgtcattttgcttttttcactgccacaaccagccaataaacccatagcagcaacggctacgagtgcgatagctgtcaattttttgaatttaaacatagtatcctcctcaaacatgatacaaacatattaatctgtttatattgtacggaattttgaaccaataggcaataacattgtataattaaaggtgcgaaaacaaattatgtacatgaaatgtaccttttaccaaataaggtcggttatttatacatacatttaggagggcctatgtctcttactgaacaattttctagtgcttgtgaaagcttcgcccaagaggctttcaccattaattatacattggctaagaatcctgaactgtctagtcatgaatttaaatccgttaagacaatcggagctgttcttgaaaagcacggcatccctgtgacctatgagttctgtaatttgccaacagcgtttaaggcatctgctgtgaaagtagatcatcctaaaggacgtttggtgattttatgcgaatacgatgcgttgccagatgtgggtcatgcgtgtggccattgcgccagtggctctatgagtaccttagcagcccttgcattacataagatgcagcaagatggcgtagctttcaatatggacattgacatcatcggcacacctgatgaggaagcgatgggctgcaaggtggatatgtgcaacgctggcgtgtttaagaattatgattttgccattatggtccatctcgacggcgaagaaacgcgtcctaattcacagttcttggctctcgattgtttccgcgccaagtatcacggtaaatcggcccatgcggcaggcgaaccttggaatggcatcaatgctgtaaatggcgtgcaacttgccatccatgctatggatatgctgcgccaacaagtgcgtccagagtctcgcatcggcacgtggatcattaatggtggtaccgcatctaatgttattcctgcgactggcgaattagaggttaccgtacgtcatacagaacgtgactatttgaacggtttatctgaacagattaaaaaaatctttgaaggtgctgccctttgtactggtacaacagtagatgttgagttttacggaaatccctatgacgatatgaaccaaaaccatcgcggcacacacctcatcgaagaggtgatgaccgatatgggccttgattttgaaccaggtccagcggatattgggggcagttccgatatcggtaatgttagctatcaatgtgccgcattccatcctaagttgcgcttggctggcccagataaggtgtgccacgccaaagaatttgcggacgctatgctggaaccaaccattgagcaaaccattgtagatggcgccaatatcattgggggcacattgttgcgattagtagaaaatccaactgtcttagaagaaattgtggctgagtttaatgcaactaaataattctcatctacatataatattactaaatagtttctagctgatgggaatagcgctaaataaaatgtttcctgtatctgtctggggaactgtaatatcgtagatagaattcgttgcctctttcagaatttttgataatagatgataagagaacattgccatttataaaactacgattttgggtaaaataagtgcccacctcaatgtcgtggtgatggagcgcccagaccacgttatttccagcgatgacaggaatgtatttaaactcaagatattcaaataaactagctatggtgatgccgtctggtacagtaaattcttcgcgatgatgactcatatcatcggccgcacaaacggcatctcgatcgataattatatgcatatgatttcacatcctttgaaatagtcattctacaatcttatgtgattatctatattgtacatcaagtaaaatttatattgtatcaaaggaggttttatgtccgcatctgaaccattagacattaaaaactatataggccttactggtgatactcccattcgattcatcgcgtccgacgtggatggcactttagtgaacgacgcgaaatccgtagatccagaggtggtcaatgcggttcgtgccgctcgtgaaagcggtatccgcgtggccatcgcatcgggccgtgcgtggcatgagatggacgatgtcatcgaggccatgccgtgcttgcgctactttgtgtgcaccaatggcgcctatgtcatggataaagaagagcaaaaggaactcgttcacatttcctttgataaaactcgcgccatggatttagtacgaaaactaatgacctatggtgtgtttgtagaggcttatgtgaaagccgagattttcggtcaataccctgttgttggtaatgagacagcgcaagcagaacatttctttagaccgaatattagacctttcattttaaaaacacgtaccatggtgcctgatttattggcacatctagaatctttgctaaaaggaccggagaaaatccaaatcttttacggcgatgaatgtatacgcgaacgcatcctagctgatttgcgagatgaattccaaggggctgccacagatggaaaaggccgagaacgtttttacgatgtccttgaatctagcgagggcaatttagaatttgtactccctcatacgacaaaaggcacggccgtagaggccttggctaaccattggggctatacgcctgacgaggtgatgaccatcggcgacagcgaaaatgatctatccatgattcgctttgccagcgctagcgtggctatgggtaatgcacgagataatgtgaaagctgccgcccgttatgaaacgacagataataatcactatggcgtagctcgtgcactatattcggctattgcatataatcgtgaattggaaaataaatagacatactaagtggctaatagaaatactaagctattaagggacatactagtctactaatagaaatactaagaggctaatggaaatagtaatcggataatggatagatactatatcttatgattgatagagaggtgatgttatatgggcaatctaaaatttgatatagacgatacctgtgttaaatgcggggcctgcgctgaggattgccctgtacaatgcattgctgaaggaactacaaaatttatcattggtaaggggtgtattagttgcggcgattgctattcaatttgtcctgtcggggccgtacaaatacataagctgtttaaagatagaacaggcctgtagtaatgtaaaatgagtgtgtgtaatagaccttctaaaaattagaacaggcctgtagtaatctgaaatgggtatgtgcaataggccttctgaaaaatagaacaggcctgtagtaatctgaaatgggtatgtgcaataggccttctgaaaaatagaacaggcctgtactaatctgaaataggtgtgtgcaataagccttctaaaaaatagaacaggcctgttctattttaaaataggcatatgaaagggcgaccttgaactatcagtatcagaaatgtattagaaatccgaacgataaaaagtaatgtataactttcatacggaatatatggagtccatatacttcgtatggtataatgaaatgtaatgaaatttagcgttttgcttgttaaaacgcacccccagtacaggaatgtatggacattataaattggtgaatatactttcacaaatagatgcatacggaggaactatggaaaacaaggaatttgttattgttgtcgatttcggcggtcaatataatcagttgattgcacgccgtgttcgtgaaaatcatgtatactgcgaagtatatccatacaacaaagcattagaaaaaattaaggaattgaagccgcaaggtatcatcttcactggtggccctaacagcgtgtacgaagagaattcccctaaaattgaaaaggaaatctttgaacttggcattccagttcttggcatgtgctatggtatgcaatttatggcgcatacattgggtggcgaagttaaatctgcggacaaccgtgagtttggtaaaacacctactaaagtggacactacatccccattgttcaaaggcttggacgaagaacaagttgtttggatgtcccacgttgactatgtagcaaaagttcctgaagggttcgaaatcgttgcgcatacaaaagactgccctgttgcatctatgcaaaataaagaacgtaaattatacgctatgcaataccatgcagaagtattgcacactgaacatggtaaagaaatgcttcacaacttcttgtatgaagtatgtggttttacaggcacatggactatggcaaaatatgcaaaaactgctattgaagaaatccgtaacactgtaggcgatggcaaagtattgttggcattatctggcggtgtagatagctccgttgcagcagctcttatttctaaagctgtaggcgaccaattgacttgtatcttcgttgaccatggtttaatgcgtaaaaacgaaggcgacgaagtggaagcagctttcaaagattccggcatgcatttcatccgcgtcgatgcagaaaaacgtttcttagataaattggctggtcttgaagatccagaagctaaacgtaaagctatcggcgaagaattcattcgcgtattcgaagacgaaggtcgtaaaatcggctccgttgacttcttggcgcaaggtacaatctatcctgacgttattgagtctggtactggcgaagcagaagttatcaaatctcaccacaacgtaggcggcttgcctgcagttgtagactttaaaggccttatcgaaccattgcgcaacctcttcaaagacgaagtacgtgaacttggttctgaattaggcttggctgattacctcgtatggcgtcaaccatttccaggtcctggtcttgcaatccgcgtaatgggcgaaatcacgaaagacaaactcgacatcttacgtgatgcggactacatattccgtgatgaaattgcaaaagctggtcttgatcgtagcattaaccaatactttgcagtattaacatctacacgtactgtaggcgttatgggtgacttccgtacatacgattacacattggcattgcgtggcgtaacaacaacagacttcatgactgctgactgggcgcgcattccttacgacgtattggacacaatctcccgtcgtatcgtaaacgaagtacaacacatcaaccgtatcgtgtacgatattacatctaaaccacctgctacaattgagtgggaataataagaaatattgatttataaattcattaactgtactttttgagtaatactaaattcaactgaaaggtaaaagaataggtttgaaagggagttagttattgaattttaagtgcgcataaaagcctcccattgttttgatgggaggcttttttactattttgattgaatata

SEQ ID NO: 716 - DNA, 6323 bp, Veillonella atypica
  source 1..6323: mol_type = genomic DNA
ttattataagagctggattagagcctagagattttgatgctattaggatacttttgggtgtaatgcatatgaatatagcatctaattctgtttcgttatattctgattctttttttataaaagatgtaatcgaccattatattgcgttggctatattacggcatatagatttaaataattcagaacataatgaatctaaggagagcagtagaaatcgaagaactaaaaaatgtacttttacgatggcttttaataaaatatataaatttaataagacagtactttcagaaccagctgcaacttttgtggctaaggattttccaaacatagtttcagcatcaatagattctccaaataattctttaatgatacataaaaaaatgctgttaagtgatgcgagctttgaagtattagaaggaaaaaattatacaggtcttcaggacttaatcaagaagtctcaaaaactatataaaaacctactgaagaaagaggttgaaggggagtatgctttaaacgaagcatttttattagagcaacttgatgaacaaacatgctgcttaccaattgtattgctacataaatggctttatcaacagaatgtatcctatgagattcggaccctattatctttaaattatcatgagcttaatgcatctttatttcttttcttgatgctattatgtaacttgccacactatatggctgtttccgtgctaaagcggtttaatgagatgccaactcgtggtttatttaccaataaaccttttataaatacagaagagttaattgattatgaagaagcttttttgaatatagagttattaaatcaggtgctattagtattcttgtttgatatttttccgtttattgatcaaactataaaatctatagttagaaattctaatgatgatagtcttgaacgttttaaattggactcgtataatgttttatcaagtctaacttataatcaatatcgagaagaattaaaaaccttatataataaaactgatatgtcttcatattatgattgcgatatagtgcagtatttagatagttttttgcataagcctctttcgcttcagatacaacaaaaggaggggctagatatagtgaagggcgatatgcagttttcgggcatcgcttggtctcaagcttctaaaagggatagcttatataatattacgcatcaatgtattttagatttatttatatatctttataatgaatatagagtatacctccatagggaaaacacttataagagtggacactctatatttatagaagaagatatggttcagtctaacccacaacacatttcttgggcatctaaggatattcggtggaataaaaaattagaaactgagagcctaactgatttgatatatatttggataaaaaaaatgtatacaattgattcctcatatgtatggggacggttagaggatgaacggttagtcgggttattaaaaatacaagaaaatgaatccactttgattagaggattaactaaatacagatatcattataatgatacttttgaacttagtgatccaatgaagagcgtaaaaaaagtacttactaaattctttaagtgcttttatgctgtattaaactgtgatgatattgaaagtatgcctctaaaaaaatttgtattacaggatgagcatcttaaaatgcatatgaaaaatcctatattagatacatttaataaggatactttttgtttatattaaccatatgttaatgatgagaaaattaagcaaatttcttgagtgtgttgtaacttgcgataagcatagtttaagaaaatcatatttagccttatatgatatactcgaacagtttttatggaatatttcattatatttagaaaaatgtagtatagagaaaaaggaggctactattcgtcttaaaaaggtgatattagacaagataatttgtgaacctatggggaatagaagattatttaaaggtcgacctaatcttagaatgcaattgattaaaccagctaaaagagataataactaatattttcacactgtatttaccaaatttaccatttttaccaatttttaagatagattagtacatatattacatacctttattttttggtaaatttggtaaaaatggataaaaattttgtacatacaaatctctatcttgctttctgtcgttttttataagggagataaaatatagataagcaagatagaacaaccttagaataagattatagtttagcttcgttataaaaaacgacagaaaggcggggcgtgtctttattgacacgccccgccttaatttataaaaaagtaatagtaactgtacatacagataattataaattctttatctgtgcagaaaggaactattatgaaaaaagataataagtctatacgatttaatttcaggttagcagaaaatgagtttaaatttattgaagctcaagcatcgctctgtgatatatcggtatctgaatacgtaaggcgatgctctttaaatgaggaaaaaatagtgatagtcgaccctgaacaatcgattgcttcattattaggtaaaatttatagtgctctatctaatcatgatgaaattaccgttgaagataagaaggagatatatagtggtttatcaggagtggtagataccttaaatatggtgattgaggagttaaaataatggcaatattaaaatttatcaaacgaaatggaatgaatttaccaaatgcaattcaatatatatcagatgagtgtaagacctctagtgactatgtttttggtatactaatgggatgtagtaatccattctcagaatttgagcttataaaaaaaatggcacaagtaaaagatgagtcgaaatcatttatacatgttgtattttcattagattgtgcagatactataccattagatacagtactcgagatttgtaaatcggtgggtcagttactttctaaagatatatatcaagtgttaggtgcaattcattataaaaatgaagcccatatacattgtcattatataattaattcaattgggctggattataagcgttatgaacaaggtatgtctttatggtcatacaagcagataattaataaaattattgaaccttatggaataagccctattctttattatcaaggtgatgaaaaaggggacttacataaaaaataaagatgaggctgtaacaaaataattctttaaatttaaaaagcggggccctaacaaaattgtccttaaataaaaaagagttccgaagtaatctgtccccctttacaggttgtctagtaaagggggacagatcattcagtaaattaattatttaaggaataaatatattctctttcattattatttaataaatcatttagctcataggcatttccattattcaatttaataaacaatgcaaagttaaacattcttatgaccattctatacaaagaatcgataccttctttgtcggtttttatttcaccttttttacccccattcaaataaacgggaaatccactccctacaacaatcattctattcaatagaaaattctgtattaactgagaaaatactgatgcatgtgcatatcgtcgtcctactgcgatgattccaccaattttattagatagcggcctttcaaatcgtaaataaccaactcctactcgatctataaatgactgcattaaacttggcataccaaagccatgtacaggtgtcgcataaatcaaacaatctgcctctttcatcttttttaaaacaatttttatatcatcattttgttgacaaggctctttacgatagttacaattttctacttcatggcaatcattacaggatttaatcattaaatcttttaaagatattacatcaaatataactttattatcacccgatatcttatttaatatacttttagcaatatcaatagctatttctgtatttccattactactctccgaaccattaattacaaggaatctaatttccatataaatactccttattatttattaattcttgtcaatcacgatacacaaattataactattatcactcctataatttcattgatacttaacttatgatttaatataagaacatctaaggccagtgtaacaattgggcctattgaactgattatagaagcacttgaagcgctaattctctttagaccataagataataagtatgacggtattatagaacacaaaatagctaaaagagccaaataaataatagtatcatgcttaattaacatcaaactatagtaattacttgtgttaaataataatatacatagtaaaaatattgttgtaatacacatatatgaactagtgaaaataacaggacttatattagtaacaacctttttactatatataatgaatatcgcccaaaaaacagcagaaacgaaaactagtaaaccacctataacaatatcattgatatcgttatttaaagtagggttaaacataacagctaagcctaaaactgtaaatatgatcaacattacttgataagctgttaagcgctttaaatcagatgacaataacaaaacatatattggaaatgtaaataatattgctctttctagggatgctgatatatataatagtcctacaaaatctgctatagaagaaattaggtagagaatcgaaccaataaaagcatattttgcaaatttctttttatttacaatacaccaatcaaatcgaataattggtatcagaaaaaagggaagtgataatatagctctacatgcaagtacaaaaactggatccaaggaatccaaataaataagttttgtccatatagatttagtggataaaaaaattgttgcaataagtatagaaagaactcctacatttttcattaatatattcactataaatatgtctccataaaattctgtatcattttcaatccattttcagtaccaatactttctgggtgaaattgtattccctctattggatatttattatgtctaacccccataatatattgatcatcttcagatttacacgtaatcgtcaaatgatcatatgtaaaattattttctgacacaattaaagagtgatatctagtaactaaacatggggaatctatacttttaaaaacacctttaccatcatgatttatataacttttcttgccatgttgtaaattattcgcatttactatatcacaaccaaaggctaaaccgattgcttgatgtcctaaacaaactcctaatataggaatttgtgctttgaatctatcaataatatcaatatagcctacgtctttaggatgacccggaccaggacctaataaaatcatatcaggattaagttcttgtattaattgattatttacctcatcagatctatagactattggattcatttctagttgttttaaatattccactaaaatatatacaaaactatcataagcatctattactaatgttttcattgctcttcctccatcacttcaaatattgatttaccagttatagtggaataagtcgctgcaagtttatttaaagtttcattccactcattttcagggatagaatcagctacaattccagcagaagcacgaatataataaacacccgcataatataaagcagttcttatacataatgctaaaatagcattcccatctagagttatagttccaatagcacccgcgtatagtcctctatgaactccttcaaattgttcaattaacttcattgcctcaattttaggagttccagtcattgtccctgcagggaatgtcgcctttataacatcaaaaatattttttttagagtctaaggtaatatttaaatcggatactaaatggaatacatgagaatacacttctacaaaaaactctcttgttaattctaaagaacctgtttcacaaacctttgctaaatcatttctgcacagatcaatcaacatcagatgttcagcaagttctttttcattatttttaagatttctaatcgttttctcatcaactagctcatttctggttcgtttagcagtacctgctatcggtctcatttctactaatgacttagttttcttaataaataattctggacttgcaccaatcactataacattacctataggagcaaaatacatatacggagaaggattaatatctcgtaaccttaaataaatatccatcggttttgtatctgttgatatagataattcatgccctatttgaatttgatatatattaccatcagatatattctccaaacatttatgcgcaatttcgataaatgtgttcttattcatactatcttctatactattaacttctaataat

SEQ ID NO: 717 - DNA, 3826 bp, Veillonella atypica
  source 1..3826: mol_type = genomic DNA
agctattccttaaggttaacccctaggtgtcaatgcacctaggggtattttttatttggaggatttgtatgaacaaatattaccaaaacacattcctatttatcagtaagcaacagtcagcattacagccattactgaaatcattacaatgggcttttagacaacagattgaacgtttagatgtgcctcttattcgtatggggatgttagccaatatgctttcggacagccgaaaacatagcattcttgattatgatctctatcagcataatcaaacaaaggaatatattttacgtattcatacagaaagcgaaggcgatacacaccctattgatatggaatattgtagagtgtatttgtcacctgatactaaattacattatgtatcagaagaacgctctgaactgacctatattaatacagatacatcacatgtatacttacctattcgattcaagattgaattatacatcgatgaaacctatgatattaactattttcttaacctaactactttacagcgatttttagtggcgacatttccttcgctacatattgatatcttcgacgggattaaagccattcactcgaaaatcaatcatcatattaaatcgctaaatactaataattggtgtcaaatttccagttatgaatctaaataatttaatttctatacaaggagaatctattatgaatactacagttgaagctatgttaacagaaattttgccaaaggcatccgttcaagagttagtggaacgttatggagatccatatgatgcattattccatgcagaagaatctgagtggtatgatgcaccaggtatgggtaaccgtggcattgccaagctacgtgctatcaaatccatcattaagaatgtgcaaaataggcctcgtaaagcccctattaatgtgggacgacctattgatatctataaagctatgtcagatatgcagtactttgaaaccgaacatgtacgagtgctatatcttaatgccagaaatcatctaataaaatcagaagacatttctattggtgatgtaacaacagcctctctagatattaaatgcattttctcttcggccgttcgtctgaaagcctgtggaattgtcattgttcataaccacccttctggcgattctcatccaagtgaattagatattcgatgtactaaacgagttgctgaagcgggtagactgtttgatattccagtactagaccacatcatcatcggacatggtgaatttcatagtatgagtgaatgcggacaattataaggaggatatgattatgccagctaaacgatttatttgccctaatggggatgaaattaatatgtatgaatgcttattgcgatgcccacaaggtacgagatgtatgtttttacctacattacgagctgtggctacctcactagaacgtaatttaaccaaaccatctgttaccgaattattaagtggtactcgcgaattatatctcaaaaagattactgaatatgccgtagatccacaaaaacaactatacgctttacatgggtcagctgtgcatacaattacagaacgtcatgctagcggtaacatgctttcagaagaacgcttgaaaaataccaccacaacagggcaatttgatttatatggacaagtgttatctaatacagatactacgctaggtgatctaaaaataacaagctcctataagcttatgaaagcattagggtattataaaaaagatgttgaaaccggtgaagtgtataaaacgggagtaaaaaaaggccaacctaaaacacgaaaagaattattcacagatggagtacgtcatgtgttagattgggccttacaattaaactattacagattattgttagaagaagaaaattacaccgtatcgtctatggtgattcaggccttatgccgtgatacagggatacgtattgcctctgaacgaggtattacaaagccgttataccttattcctatcaaccctattagcaatcattggttgaaacgatatatggaagctaaagcaaagcggttacaacaagccatagaaactggtgtagtaccgaagaaatgtagccaacgtgaaacttggcatggtaaaaaatgtgaaggctattgtgctgtatccgctcaatgcaaagcaattgaagaagcacaacaagttaagtcagcataatagaaaggaagcattatgacacaatactgcggtattattattacggagacaaatctctatgtatctgtggtaaaaagaatacaaaataaaattaaggtactagatcgctatatatgtaagcgtggacaatcactcatttcagatttggcagtcattcatagtaaaaataaacacacacctacactttactcgttagcctatactgaaattccacatcttatctttaataaagtcagctctaatacatctttacaagatgcatggaaacaaagagacgagcttacatcagcacaagacaaccgatatgcgtaccaatttatattacccactatagataaccaggaatggttgtatatggtgggtatttctcaatctaatatatctgaattacaatgtgtcgaaaaacaaaatcatatggagattgaagttgtttcctattggccagtaccacttttagatttacataaaaatcatagtaaacctacacttctactcattgaggaaaatagtagagttacaggatacctttgtagtggaactgtcattgtcactacaatcaactggaatcgacatacagaaacaccaaaagagatatggtacaacgattgctcaaagaatcacctattacattacatgatacacttgaaattcaagcatatttaagcgaaaagacatatcctttatggaaagatttaatttcgcaatatggagaggttgacaagtcaagaattactgacgtcttaaatcattttacatatcgttgggatggtgatgtacatatggatgcatctgttggcttaagttattatttagcacgatctggtgtgcaagcggaggaacaaaaatgacgaatacagcattatatgaaaagctatctcttgctatgaaaagttgtagctacattgaaaaaacaggtgaaaatacctttcatgggtattcttacgttactagtagcgatgtattagaacgtgtaaatgacgctcttacaagtgtaggcctaattacagctgttacccctacccttcttgatttacgagaggtacaaacagccaaaggtaatattgataagcacgctacaattagcgttactatatccattattgatgtagagacaggtgaatcagtacaaataagtggtattggttcagggcaagatagtggtgataaggccatcatgaaggcggaaacagcggccataaaatacgcttatatgctaagtttctgtattgctactggggatgatccagaagctgataacactacagaccttaatacacaaactatatcacaatctaagggggctataagtggaaagaaaatgattcacactcaaaccatgatagcagatgatttacattgtacagactgcggatgtgctatatccagtaaagtatctagttattctaagcaacgttaccatatgcctttgtgcatgaattgccagaagaaccatcaatctgtagcataattcattccactatactatgaaagggggtgatgttatggatccagttattacacgaattattgtagaagccgctgctacagctttgctttacttaattgcagatgaataatataggagccatgtcgataatacgacatggctcattattttttggataaaattatcgatttatttataaaatt

SEQ ID NO: 718 - DNA, 1963 bp, Veillonella atypica
  source 1..1963: mol_type = genomic DNA
ccataatcttttggttttttaaagattttctcaccttcatcattaataagatcaatcaaaacattttttatttcattctgaaatttcccaataagactccatataaagtcatgaattgttgataccctaagattcttattttctattcttgataaaatttctgcaactgcattattcgtatacgtaatgcaaactatcctaatatttggtaaatcctctgtaagtatatttatcaaagaaattaacgaatatgtttttccacttccagctccgccttctataataaaattttcaccattttttatacattgaagagcttctaagacttctttttctaaattaattgaagccataataatccctcctcaatataatgcggaaccaaccacgtttcgtcatttgtaccaacttcattatcaaaatacaataaacttgatgcaaacgacgatttttttgctaccttgttcaaagcaaaattataataatcacttgaaatatcctcatccttaaaattttttaaagcaccatatgcattaaggccatcttgatgctttaaaataaaatttttgtttaatgatataaatgcgtcttcaaaactacttgcctgatacgtaccatcaggttccggtatttgatatgctatccgaatattatctttaattttatcatctggcaatttctctacaagtgatttaaatgggttagtcgtgttatcaagacctgcatctttaaaaaaatgttttatagaagcattactagtgtgtgtaccctcatcagggtggcaactcttatacacagttttttctactcctttttcatctattttcttttccgctttaactgaatcaatatcagtaataagcaaaacctttgtccctaggaacgaaaataaaggcataaataaatgtgaatatgccccaacttctattatagaaatattttgtgataatagtggtataacatttcttgatgaatgtgctttcttatcaatcttatgcatcatcattggcattaagattctttctgtatctccttctatacaaataactttatctgcaaagaaaagctcacttctatttattgttagatatttctttacaaatctaaacccttcttgttcatctccatcatactgacttattaaagaattaaaactctttgctataacctcattcccatttttcttcaaatatatgatgtcatcaaagttacattcagaaactatgtgtgatgaatgagacgtaattaaaagctgtaatttcttatttttttcatgaagaaacttgtctctatgtatcgcaatatgtgatttaatattccttataaatacatactgcaattgaggatgtgtgtgtgcttcaggttcttcaatatataatagattaatatctgctgattgctcaaacaattcctgtattttagtttcaatctcaaacaatatacctattaaattcaaataccccaatccattataagtttctggaagtgaacaatcgtccccttgtctataacttaaagttgtattatctgacagtaagtttttctctgaaatagacgactctattgctatatcaattccattatctgaaccaccataagtttttataacacctataacatcactaaaaataccctcaacaacttctccactttcactttgttcaccattataaatcttgtatagttctttgtcggcctcctccaatttttgttcaagttttgtaaataccagctcactttcatttttgacggctttataaaaactaaagtatttacttgttaagctcgataaaacatgattacgatcatcattagaaaccgctctatccgctcttattccaactactttaattactttttgaatatccttattatcaatttcctcagatctagctgatgtaatttgattagatttaatatcaaagccccttgaatatttttttgtttcaaaataattagaaaa

SEQ ID NO: 719 - DNA, 1752 bp, Veillonella atypica
  source 1..1752: mol_type = genomic DNA
tatctaagtcttcgtcttccgttaatattttcttaataaattggattatactcttaaccggatatttcaatattggtaaccatgtatggcctgacgccacagatgcatttaatattaagctaataatactagaatacttatctagatttttcgccaattgcctcttcttttcatcattattattgggccttattttagtctttagttccttaaaaaaaatgctaatcagattattcttatccgaataattccacggagaaaaatttataattattggcttatcatcgctctttctagataaatcattaatctcattaataaccatatttaaaatagatgttttaccagttccccatttaccatataatccaattactaatccgtcattagcatcatacccataaatcgcctcacctaattgtttagaaaatgttgttcgacctaataagtcttgtttagaagactcaatcggtttatctgaatcataactcatttgctatcctcgctatacgttaaacatacatataaaattaaaacaaaaacgtactaacaaaatcacttgttagtacgttttactatgcaaataagaatatatcttatagcctaaattactgagcattcacaaattcaataactttattagcaatcatttttacatcatcttttgttaaatacatatgaagtggcatagtaataattctattagacattctatgcgcatttggacatttaccattatcataagagtacatttcatactctgtattatcacgatagtgaacacctgggtaaatatcattttcttgtagatattcaagtaatccatctcgattatctacagcaatttcatagatatgataagagcattcatcggcatgtggtgcaccaatgatttgaattttaggatcatttttaaatatctcatcatagcatctagctaattcacgacgatattcatttgtttcatccaagtatttaagctctactaagccgatagcagccatgatagaattaccatgatctttataaccaaggtactctacatcatatttccatttataagaaccttttgtgccactattacgagcatacgtatctttattaatacctaaccatgtcaatttacggcaaatttcatcatactttttattgtggaaacaaatcataccactatcagcggttggcaaatttttaacagcctggaatgaatagacagccacatctacgccatcccacgtacctggcatttgtccatttacacgagttccagccatatgcgccgcatcaagaattagttttagcttatgttctttacagattttaataattttatctaattgaccaacacgtccaccataaccaacaaaaataacagctctagttttatcattaattttacgttttacatcttcaggatctaaacaaaggtattcatctacatcagcgaaacgaggtattaatttttcatataaaacagcatgattcgtagatacaaaagtaattggtgtagttataatttcatcaccgttttcccaaccattttctttttttaagatttctactgctagatgtaatccaacagtagcagaatttaagaaatgagcattctcatgaccagtatattctttccatttattttcaaattctactgttttgaaaccaagaccagtccaacctatttctagacattctctgatttcatttaaacattcttctacatgatatttaggttttaatacttgaattgtcatg

SEQ ID NO: 720 - DNA, 1277 bp, Veillonella atypica
  source 1..1277: mol_type = genomic DNA
ggaatcttatctatatttctacagcatagaccacattgattacattcaaacatatattttctacttctaaaattaagaaattttaattttatttgatactgcttgaagttttaaaatactatcattcgccaatttaccatcatctccaattataggcaaatccaatacagcttttaaagcacccgccattgatattgcttttgcaaaaacctctttatcttcattagaatacaatgaaaaatcatcacccttagtattaattatagttgacatttcatatactaatggctcaaaaatagtatttaaagaaactaaaaatctgtaaaacatagatgcacaacgtctaatcccagtagattcaacaatagctgcacttatttcgcttttaaaggctttggcttttgctaaattagattttgcatcctcataatttgcatttgctttagatgaagctacaatccctaatattgctaatgcaggaccagcaactaaaccacctaatacggctgcaccaccagccattcctaaaccaccagcagccaatgatcctcctccaaaaaaagcaagagttgcatttgttgctgccgctccagaaagtcctgctatcgcagttcccgtagaagcagttgctaatgtagttgccaaactataagcgccaaatgcagtcacagcgccagcaacaccaccaccagcaacacctttagcaatcgatgatgcaattaatgttacgtcttttaattcctctaattgtttttcatctaaaataatttttgagaattcatcaaactcaatatttttattgtctaattctatatttttaacttttttaaattcattaatgaatttaattactgctccttgtaaaatatcaactttacactcacctaattgtttaatagaagcaccagaagattctctactaaattccattttttctttagctaaatctacaatatcctgagctttttcatttatatcatttgctttactttgagtgtcagcagcaccaataccttttgcaatacctactccacccgtaacaacagctaaaccaattaataatggtaatggcataatatttcctcctatataacagcaacaaactcttttgaacaaacagctattgattcttcaatacttttaatatttttatctatttgatcttctagttctaacaatgtattagtaccagcaaaagtcttataaacccaatttctatattcattgattcgacctaatgtttttgcacattctgttaactctaaataaatagaatc
